(19) United States
(12) Patent Application Publication
(10) Pub. No.: US 2010/0136552 A1
(43) Pub. Date: Jun. 3, 2010

(54) Methods and compositions for DMXL-associated mental retardation

(75) Inventors: Madhuri Hegde, Lilburn, GA (US); Margaret Adam, Seattle, WA (US)

Correspondence Address: MYERS BIGEL SIBLEY & SAJOVEC, PO BOX 37428, RALEIGH, NC, 27627, US

(73) Assignee: Emory University

(21) Appl. No.: 12/589,355

(22) Filed: Oct. 22, 2009

Related U.S. Application Data
(60) Provisional application No. 61/197,168, filed on Oct. 24, 2008.

(51) Int. Cl. C12Q 1/68; C12P 19/34

(52) U.S. Cl. 435/6; 435/91.2

(57) ABSTRACT

The present invention provides a method of identifying a human subject as having an increased likelihood of having DMXL-associated mental retardation, comprising detecting, in a nucleic acid sample from the subject, a mutation in a nucleotide sequence encoding DMXL1 and/or a mutation in a nucleotide sequence encoding DMXL2. The present invention further provides a method of identifying a human subject as having an increased likelihood of having DMXL-associated mental retardation, comprising detecting, in a sample from the subject, a mutation in a DMXL1 protein and/or a mutation in a DMXL2 protein.

### STATEMENT OF PRIORITY

[0001] This application claims the benefit, under 35 U.S.C. §119(e), of U.S. Provisional Application Ser. No. 61/197,168, filed Oct. 24, 2008, the entire contents of which are incorporated by reference herein.

### INCORPORATION OF SEQUENCE LISTING ON COMPACT DISK

[0002] The entire contents of the compact disk filed in identical duplicate herewith and containing one file entitled “9799-2 FINAL Sequence Listing CD copy” (604 kb; created Oct. 22, 2009) are incorporated by reference herein.

### FIELD OF THE INVENTION

[0003] The present invention provides methods and compositions directed to detection of mutations in the DMXL1 and/or DMXL2 gene and identification of subjects having an increased likelihood of having DMXL-associated mental retardation and/or of having DMXL-associated mental retardation.

### BACKGROUND OF THE INVENTION

[0004] Mental retardation is characterized both by a significantly below-average score on a test of mental ability or intelligence and by limitations in the ability to function in areas of daily life, such as communication, self-care, and getting along in social situations and school activities. Mental retardation is sometimes referred to as a cognitive or intellectual disability [1-6].

[0005] Mental retardation can start anytime before a child reaches the age of 18 years. It may result from injury, disease, or a brain abnormality, which can occur before a child is born or during childhood. For many children, the cause of their mental retardation is not known [7, 8]. Some of the most common known causes of mental retardation are Down syndrome, fetal alcohol syndrome, and fragile X syndrome, all of which are determined before birth [9-11]. Other causes that take place before a child is born include genetic conditions (such as Cri-du-chat syndrome or Prader-Willi syndrome), infections (such as congenital cytomegalovirus), or birth defects that affect the brain (such as hydrocephalus or cortical atrophy) [12, 13]. Other causes of mental retardation, such as asphyxia, happen while a baby is being born or soon after birth. Still other causes do not occur until a child is older.

[0006] There are several hundred disorders associated with mental retardation, and many of them play a causal role in mental retardation. The American Association on Mental Retardation subdivides the disorders that may be associated with mental retardation into three general areas: prenatal, perinatal, and postnatal causes [14]. It should also be noted that mental retardation is both a symptom of other disorders as well as a unique syndrome or disorder.

[0007] It is emerging that mental retardation can result from a wide range of protein abnormalities. The genes identified earliest were frequently signaling molecules in the RhoGTPase pathway (GDI, PAK3, ARHGEF6) [15] or associated with chromatin remodeling (RPS6KA3, ATRX) (17-19). Most recently, parts of the synaptic vesicle or components necessary for its formation have been identified as defective (SYN1, SLC6A8, NLGN4, and DLG3), and a number of novel transcription factors (ZNF41, 81 and 674) have been found [3, 16]. The number of identified genes that cause mental retardation suggests that a mental retardation phenotype can emerge as the final common pathway of many different types of abnormal cellular processing and that no one dominant mechanism is likely to be the cause of mental retardation. Although these observations are a far way from suggesting therapeutic treatments in humans, the possibility of offering drugs to treat some aspects of learning disability is now a realistic possibility in the future. The original aim to understand the molecular basis of intellectual disability and to provide better clinical service to this group of patients and their families is therefore rapidly being achieved.

[0008] The next challenge is to provide cheap, accurate, and effective mutation analysis for families with a history of mental retardation. Together with this, rapid and effective functional assessments of pathogenicity of variants for all genes need to be developed. The development and proper assessment of animal models of disease is needed in order to understand the pathways and improve the chances of finding therapeutic targets for learning and memory disabilities in patients in the future.

[0009] It is estimated that the lifetime costs for all people with mental retardation who were born in 2000 will total $51.2 billion (in 2003 dollars) [17, 18]. The average lifetime cost for one person with mental retardation is estimated to be $1,014,000 (in 2003 dollars). This represents costs over and above those experienced by a person who does not have a disability.

[0010] Prader-Willi syndrome (PWS) is a developmental disorder characterized by mental retardation (MR), infantile hypotonia, poor suck reflex, growth retardation, and childhood onset of pronounced hyperphagia resulting in morbid obesity [19-21]. PWS is a classic imprinting disorder with most cases resulting from paternal deletions of 15q11-q13 or maternal uniparental disomy 15 [22, 23]. However, not all patients who present with PWS-like phenotype have chromosome 15 involvement, suggesting genetic heterogeneity. Recently, a PWS-like phenotype has also been described in patients with chromosome abnormalities involving the chromosome region 6q16.2 that includes the SIM1 gene [24]. Cytogenetic and gene studies, including a screening for the SIM1 gene deletion, have recently been performed on 87 patients with a PWS-like phenotype. These observations suggest that mutational analysis and further studies of the parental origin of chromosome alterations of 6q16.2 in patients with and without a PWS-like phenotype are needed to evaluate possible imprinting effects of the SIM1 gene and establish the contribution that alterations in this gene make to the etiology of syndromic and non-syndromic obesity [24, 25].

[0011] WD-repeat proteins are defined by the presence of four or more repeating units containing a conserved core of approximately 40 amino acids that usually end with tryptophan-aspartic acid (WD) [26]. WD-repeat proteins belong to a large and fast-expanding conservative protein family. The G protein was the first WD-repeat protein to be crystallized. The crystal structure of the G protein β subunit showed a β propeller structure. All WD-repeat proteins are believed to form a circularized β propeller structure [27, 28]. The importance of these proteins is underscored by the critical roles they play in many essential biological functions ranging from signal transduction to transcription regulation and apoptosis.

[0012] There is a recognized association of WD-repeat proteins with several human diseases, such as Lissencephaly-1, Cockayne syndrome, and Allgrove syndrome. The Lissencephaly-1 gene (LIS1) was the first gene encoding a WD-repeat protein that had a proven association with a human disease. Both deletion and point mutations in the LIS1 gene are linked to Lissencephaly [29, 30]. Cockayne syndrome (CS) is associated with mutations in two genes, CSA and CSB. The CSA gene has five WD repeats, and missense and deletion mutations in this gene are associated with CS [31, 32]. Triple-A syndrome, which is also known as Allgrove syndrome, is associated with mutations in the AAAS gene [33]. X-linked ocular albinism is caused by a deletion and point mutation in the OA1 gene, which contains WD repeats [34].

[0013] WD-repeat proteins are evolutionarily conserved and have diverse functions. WD-repeat proteins perform a broad variety of cellular functions [35-37]. Currently, a total of 136 WD repeat-containing proteins have been identified in the human genome [38]. Most of these proteins seem to be regulatory. A recent study has shown that over 30 functional subfamilies can be identified among the current WD-repeat-containing proteins observed in sequenced genomes [38]. These subfamilies are roughly categorized into signal transduction, RNA synthesis/processing, chromatin assembly, vesicular trafficking, cytoskeletal assembly, cell cycle control, apoptosis, and unknown [39-42].

[0014] Sequencing of the human genome has led to a major revelation; namely, the human genome seems to encode far fewer genes (approximately 30,000) than the commonly established prediction (50,000 to over 140,000) [43, 44]. The number of genes encoded by the human genome is only about twice as many as those found in the worm (Caenorhabditis elegans) and the fly (Drosophila melanogaster). As a consequence, it appears that gene and protein networks, as opposed to simple gene number, must be responsible for the complex molecular processes of human development and physiology. Alternative mRNA splicing, RNA editing, and post-translational protein modification have been suggested as contributing mechanisms. Another critical contributing source derives from protein-protein interactions, in which WD-repeat proteins are central players. To date, many WD-repeat proteins have been identified and their associated function defined, whereas for others, the function remains unknown. The functions identified to date range from signal transduction to cell cycle control. The importance of this family of proteins is evident; their sequence has been conserved across all species in eukaryotes, these proteins perform multiple essential functions, and several human diseases have been recognized as resulting from mutations in WD-repeat proteins.

[0015] Thus, the present invention overcomes previous shortcomings in the art by providing methods and compositions for detection of mutations in the DMXL1 gene and/or the DMXL2 gene and the identification of subjects having an increased likelihood of having DMXL-associated mental retardation and/or of having DMXL-associated mental retardation.

### SUMMARY OF THE INVENTION

[0016] In one aspect, the present invention provides a method of identifying a human subject as having an increased likelihood of having DMXL-associated mental retardation, comprising detecting, in a nucleic acid sample from the subject, a mutation in a nucleotide sequence encoding DMXL1 and/or a mutation in a nucleotide sequence encoding DMXL2.

[0017] In an additional aspect, the present invention provides a method of identifying a human subject as having DMXL-associated mental retardation, comprising detecting, in a nucleic acid sample from the subject, a mutation in a nucleotide sequence encoding DMXL1 and/or a mutation in a nucleotide sequence encoding DMXL2.

[0018] Further provided herein is a method of screening a human subject for DMXL-associated mental retardation, comprising detecting, in a nucleic acid sample from the subject, a mutation in a nucleotide sequence encoding DMXL1 and/or a mutation in a nucleotide sequence encoding DMXL2.

[0019] In yet further aspects, the present invention provides a method of identifying a human subject as having an increased likelihood of having DMXL-associated mental retardation, comprising detecting, in a sample from the subject, a mutation in a DMXL1 protein and/or a mutation in a DMXL2 protein.

[0020] Additionally provided is a method of identifying a human subject as having DMXL-associated mental retardation, comprising detecting, in a sample from the subject, a mutation in a DMXL1 protein and/or a mutation in a DMXL2 protein.

[0021] Furthermore, the present invention provides a method of screening a human subject for DMXL-associated mental retardation, comprising detecting, in a sample from the subject, a mutation in a DMXL1 protein and/or a mutation in a DMXL2 protein.

[0022] Also provided herein is a method of amplifying a segment of a nucleotide sequence encoding DMXL1, comprising: a) choosing a first oligonucleotide primer from a nucleic acid sequence comprising the nucleotide sequence of SEQ ID NO:1, the nucleotide sequence of SEQ ID NO:3 or the nucleotide sequence of SEQ ID NO:5; b) choosing a second oligonucleotide primer from a nucleic acid sequence comprising the nucleotide sequence of SEQ ID NO:1, the nucleotide sequence of SEQ ID NO:3 or the nucleotide sequence of SEQ ID NO:5 that differs in nucleotide sequence from the first oligonucleotide primer; c) adding said first oligonucleotide primer and said second oligonucleotide primer to a nucleic acid sample; and d) amplifying a segment of the nucleotide sequence encoding DMXL1 defined by said first oligonucleotide primer and said second oligonucleotide primer, wherein said nucleic acid sample is from a subject having a DMXL-associated mental retardation phenotype.

[0023] Also provided herein is a method of amplifying a segment of a nucleotide sequence encoding DMXL2, comprising: a) choosing a first oligonucleotide primer from a nucleic acid sequence comprising the nucleotide sequence of SEQ ID NO:2, the nucleotide sequence of SEQ ID NO:4 or the nucleotide sequence of SEQ ID NO:7; b) choosing a second oligonucleotide primer from a nucleic acid sequence comprising the nucleotide sequence of SEQ ID NO:2, the nucleotide sequence of SEQ ID NO:4 or the nucleotide sequence of SEQ ID NO:7 that differs in nucleotide sequence from the first oligonucleotide primer; c) adding said first oligonucleotide primer and said second oligonucleotide primer to a nucleic acid sample; and d) amplifying a segment of the nucleotide sequence encoding DMXL2 defined by said first oligonucleotide primer and said second oligonucleotide primer, wherein said nucleic acid sample is from a subject having a DMXL-associated mental retardation phenotype.

[0024] Other and further objects, features and advantages would be apparent and more readily understood by reading the following specification and by reference to the accompanying drawing forming a part thereof, or any examples of the embodiments of the invention given for the purpose of the disclosure.

### BRIEF DESCRIPTION OF DRAWINGS

[0025] FIG. 1 shows the locations, relative to the exon involved, of some of the nucleotide sequence mutations identified in the DMXL1 gene, which resulted in the corresponding amino acid mutations detected in DMXL.

### DETAILED DESCRIPTION OF THE INVENTION

[0026] The present invention is explained in greater detail below. This description is not intended to be a detailed catalog of all the different ways in which the invention may be implemented, or all the features that may be added to the instant invention. For example, features illustrated with respect to one embodiment may be incorporated into other embodiments, and features illustrated with respect to a particular embodiment may be deleted from that embodiment. In addition, numerous variations and additions to the various embodiments suggested herein will be apparent to those skilled in the art in light of the instant disclosure, which do not depart from the instant invention. Hence, the following specification is intended to illustrate some particular embodiments of the invention, and not to exhaustively specify all permutations, combinations and variations thereof.

[0027] The present invention is based on the unexpected discovery that a mutation in the DMXL1 gene and/or DMXL2 gene of a subject, particularly a mutation that disrupts the function of DMXL1 and/or DMXL2, results in the phenotype described herein and identifies a subject as having an increased likelihood of having DMXL-associated mental retardation or of having DMXL-associated mental retardation. Thus, when a subject demonstrating the phenotype of this invention is tested and a mutation in a nucleic acid of the subject in the DMXL1 gene and/or DMXL2 gene is detected, the subject is identified as having or is identified as having an increased likelihood of having what is defined herein as “DMXL-associated mental retardation.” It has been the inventors' observation that any mutation in the DMXL1 gene and/or DMXL2 gene, particularly a mutation that disrupts the function of DMXL1 and/or DMXL2, in a subject demonstrating the phenotype of this invention allows for the identification of a subject as having DMXL-associate mental retardation or as having an increased likelihood of having DMXL-associated mental retardation.

[0028] Thus, the invention is the discovery of the association between a function-disrupting mutation of the DMXL1 gene and/or DMXL2 gene and the phenotype of this invention. Although several exemplary mutations are described herein, the specific mutation or mutations detected do not define the invention; rather the invention is defined by the presence of any mutation in the DMXL1 gene and/or DMXL2 gene and its association with the phenotype described herein. The detection of any mutation in the DMXL1 gene and/or DMXL2 gene of a subject having the phenotype described herein allows for the identification of that subject as having DMXL-associated mental retardation or as having an increased likelihood of having DMXL-associated mental retardation.

[0029] As noted herein, many subjects of the studies described herein who present with clinical features that resemble other neurodevelopmental disorders have tested negative for known neurodevelopmental disorders such as Prader-Willi syndrome and/or Rett syndrome.

[0030] The present invention allows for a clinician to assign a diagnosis (either by the methods of this invention alone and/or in combination with other information known to one of skill in the art) to such subjects having the phenotype of this invention and a function-disrupting mutation in the DMXL1 gene and/or DMXL2 gene, which is invaluable to the clinician and medical community in developing treatment plans as well as in monitoring and documenting any changing/evolving aspects and/or unique characteristics of the phenotype, in order to understand and subsequently identify ways to prevent, treat and/or cure DMXL-associated mental retardation.

[0031] Such identification is also extremely valuable to family members, relatives, educators, social workers and caregivers, in allowing for an understanding of the genetic nature of the phenotype as well as an understanding of the subject's clinical features and symptoms, which facilitates addressing the medical as well as the social, emotional, educational and developmental needs of the subject.

[0032] Furthermore, this discovery facilitates development of a test for early diagnosis and prenatal detection of DMXL-associated mental retardation. Even more importantly, the discovery of the association of a mutation in the DMXL1 gene and/or DMXL2 gene and the neuropathological phenotype described herein identifies the genetic basis for this disorder, providing opportunities for therapy.

[0033] Thus in one embodiment, the present invention provides a method of identifying a human subject as having an increased likelihood of having DMXL-associated mental retardation, comprising detecting, in a nucleic acid sample from the subject, a mutation in a nucleotide sequence encoding DMXL1 and/or a mutation in a nucleotide sequence encoding DMXL2.

[0034] Further provided herein is a method of identifying a human subject as having DMXL-associated mental retardation, comprising detecting, in a nucleic acid sample from the subject, a mutation in a nucleotide sequence encoding DMXL1 and/or a mutation in a nucleotide sequence encoding DMXL2.

[0035] The present invention further provides a method of screening a human subject for DMXL-associated mental retardation, comprising detecting, in a nucleic acid sample from the subject, a mutation in a nucleotide sequence encoding DMXL1 and/or a mutation in a nucleotide sequence encoding DMXL2.

[0036] In additional embodiments, the present invention provides a method of identifying a human subject as having an increased likelihood of having DMXL-associated mental retardation, comprising detecting, in a sample from the subject, a mutation in a DMXL1 protein and/or a mutation in a DMXL2 protein.

[0037] Furthermore, the present invention provides a method of identifying a human subject as having DMXL-associated mental retardation, comprising detecting, in a sample from the subject, a mutation in a DMXL1 protein and/or a mutation in a DMXL2 protein.

[0038] Additionally provided herein is a method of screening a human subject for DMXL-associated mental retardation, comprising detecting, in a sample from the subject, a mutation in a DMXL1 protein and/or a mutation in a DMXL2 protein.

[0039] Exemplary mutations of this invention include, but are not limited to, the following nucleotide substitutions (with numbering based on the nucleotide sequence of SEQ ID NO:5 for DMXL1 and the nucleotide sequence of SEQ ID NO:7 for DMXL2): 5476C>T in the nucleotide sequence encoding DMXL1, 5947A>G in the nucleotide sequence encoding DMXL1, 6166 C>T in the nucleotide sequence encoding DMXL1, 1462 A>G in the nucleotide sequence encoding DMXL1, 3716 G>C in the nucleotide sequence encoding DMXL1, 4765A>G in the nucleotide sequence encoding DMXL1, 5321 G>A in the nucleotide sequence encoding DMXL1, 6199G>A in the nucleotide sequence encoding DMXL1, 6225C>G in the nucleotide sequence encoding DMXL1, 6839G>T in the nucleotide sequence encoding DMXL1, 8198G>A in the nucleotide sequence encoding DMXL1, 4466G>T in the nucleotide sequence encoding DMXL2, 6032A>T in the nucleotide sequence encoding DMXL2 and any combination thereof.

[0040] At the amino acid level, an exemplary mutation of this invention can be an amino acid sequence mutation having the following amino acid substitutions (with numbering based on the amino acid sequence of SEQ ID NO:2 for DMXL1 and on the amino acid sequence of SEQ ID NO:4 for DMXL2): R1826C in DMXL1, M1983V in DMXL1, R2056C in DMXL1, K488E in DMXL1, C1239S in DMXL1, M1589V in DMXL1, S1774N in DMXL1, V2067M in DMXL1, D2075E in DMXL1, G2733D in DMXL1, Q1926R in DMXL1, R1489I in DMXL2, D2011V in DMXL2 and any combination thereof. The positions of the DMXL1 protein mutations relative to the location of the corresponding nucleotide sequence mutations are shown in FIG. 1.

[0041] As noted above, the invention is not limited to these exemplary mutations and encompasses the detection of previously undetected mutations according to the methods described herein in order to identify a subject as having an increased likelihood of having DMXL-associated mental retardation or as having DMXL-associated mental retardation.

[0042] In the methods of this invention, the mutation in the DMXL1 gene and/or DMXL2 gene can be missense mutation. In further embodiments, the mutation can be a nonsense, a missense, a frameshift, an insertion or a deletion of one or more base pairs. Mutations could lead to a truncated protein, could alter the conformation of the protein or could directly affect an amino acid required for function of the protein. A mutation that produces no deleterious effects on, or disruption of, the function or structure of the DMXL1 protein and/or the DMXL2 protein and produces no detectable phenotype is not included in the present invention. A mutation is detected relative to the wild type sequence of the DMXL1 gene (SEQ ID NO:1), DMXL2 gene (SEQ ID NO:2), DMXL1 mRNA (SEQ ID NO:3). DMXL2 mRNA (SEQ ID NO:4), DMXL1 coding sequence (SEQ ID NO:5), DMXL2 coding sequence (SEQ ID NO:7), DMXL1 amino acid sequence (SEQ ID NO:6) and DMXL2 amino acid sequence (SEQ ID NO:8), as set forth in the attached Sequence Listing.

[0043] In some embodiments of this invention, the mutation in the DMXL1 gene and/or DMXL2 gene is in a noncoding region of the gene and/or in a coding region of the gene. For example, regions of a nucleotide sequence encoding DMXL1 and/or DMXL2 that can be analyzed (e.g., by amplification) to detect a mutation include regulatory regions (e.g., promoter sequence, enhancer sequence, termination sequence, cis-acting sequence, etc.), exons, introns, exon/intron junctions, untranslated regions, etc. as are well known in the art. The nucleic acid can be employed in the methods of this invention as genomic nucleic acid, mRNA, cDNA or any combination thereof.

[0044] In the methods of this invention, a mutation in a nucleotide sequence encoding DMXL1 and/or in a nucleotide sequence encoding DMXL2 can be detected by a variety of methods well known in the art for analyzing nucleic acid. Such methods include but are not limited to sequencing, electrophoresis, nucleic acid hybridization (e.g., with hybridization probe(s) attached to a solid support), fluorescence in situ hybridization, reverse transcription-amplification (e.g., polymerase chain reaction, ligase chain reaction, etc.), high-performance liquid chromatography (HPLC) (e.g., denaturing HPLC), restriction fragment length polymorphism analysis, comparative genomic hybridization (CGH) array and any combination thereof.

[0045] Furthermore, in the methods of this invention, a mutation in an amino acid sequence of DMXL1 and/or in an amino acid sequence of DMXL2 can be detected by a variety of methods well known in the art for analyzing proteins and amino acid sequences. Such methods include but are not limited to sequencing, electrophoresis, immunoassay, molecular weight analysis, mRNA profiling and any combination thereof.

[0046] In some embodiments of this invention, the subject has a phenotype of clinical features that demonstrate that the subject has a neurodevelopmental disorder. This phenotype, referred to herein as the phenotype of this invention and as a “DMXL-associated mental retardation phenotype” is defined as a collection of clinical features comprising, consisting essentially of, or consisting of microcephaly (e.g., acquired microcephaly), hypotonia transitioning to spasticity in childhood and language impairment (e.g., severe language impairment). Other clinical features of this phenotype can comprise, consist essentially of, or consist of mental retardation, poor suck reflex, growth retardation, strabismus, hyperactivity, later onset obesity, prominent forehead, low-set, dysplastic ears, palatal anomalies, down-turned corners of the mouth, receding chin, small hands/feet, tapered fingers, camptodactyly and/or genital malformations, in any combination. In some embodiments, one or more of these clinical features is not detected in the subject and therefore the phenotype can be defined as the absence of said one or more clinical features.

[0047] In addition or alternatively, a subject of this invention can also be a subject that has tested negative for one or more neurodevelopmental disorders and/or can be a subject who does not meet the criteria for clinical diagnosis of one or more neurodevelopmental disorders. Such neurodevelopmental disorders include but are not limited to Prader Willi syndrome, Rett syndrome, Angelman syndrome, autism, non-syndromic mental retardation, idiopathic neonatal encephalopathy, idiopathic infantile spasms, idiopathic cerebral palsy, schizophrenia, Fragile X syndrome, Down syndrome, Cri-du-chat syndrome, Rubenstein-Taybi syndrome, fetal alcohol syndrome and any combination thereof.

[0048] A subject of this invention that has the phenotype of this invention and/or who has tested negative for a neurodevelopmental disorder for which testing is available and/or who does not meet the criteria for clinical diagnosis for a specific neurodevelopmental disorder can be tested for the presence of a mutation in the subject's DMXL1 gene and/or DMXL2 gene according to the methods described herein. Such a subject in whom such a mutation is detected is a subject having an increased likelihood of having DMXL-associated mental retardation or is a subject having DMXL-associated mental retardation. As used herein, the term “DMXL-associated mental retardation” is a disorder defined by the presence of the DMXL-associated mental retardation phenotype of this invention in a subject and a mutation in the DMXL1 gene and/or DMXL2 gene of the subject.

[0049] In some embodiments of this invention, the mutation in the DMXL1 gene and/or DMXL2 gene results in disruption of the function of the DMXL1 protein and/or the DMXL2 protein. Disruption of the function of the DMXL1 protein and/or the DMXL2 protein can result in the development of the phenotype of this invention in a subject.

[0050] The terms “disruption of the function” or “disrupts function” as used herein are defined as a prohibition or interference with the normal function of the DMXL1 protein and/or the DMXL2 protein. In another embodiment, the terms refer to prohibiting or interfering with normal function of a complex of proteins that includes the DMXL1 protein and/or the DMXL2 protein.

[0051] Methods of determining if the function of a DMXL1 protein and/or a DMXL2 protein include, but are not limited to, measuring the amount of mRNA encoding DMXL1 protein and/or a DMXL2 protein in a sample from a subject and/or measuring the amount of a DMXL1 protein and/or a DMXL2 protein in a sample from a subject, wherein if the amount of mRNA and/or protein is decreased relative to a control, a determination can be made that the function of the DMXL1 protein and/or DMXL2 protein is disrupted.

[0052] Other methods of determining if the function of DMXL1 protein and/or DMXL2 protein has been disrupted include measuring the amount of activity of DMXL1 protein and/or DMXL2 protein in a sample from a subject. For example, the amount of activity of a DMXL1 protein and/or a DMXL2 protein can be determined by carrying vesicular trafficking assays according to methods well known in the art and as described herein. A modulation (e.g., an increase or decrease) in the amount of activity of a DMXL1 protein and/or a DMXL2 protein relative to a control allows for a determination that the function of the DMXL1 protein and/or DMXL2 protein has been disrupted.

[0053] The present invention further provides methods of amplifying nucleic acid in a subject having the phenotype of this invention. Thus, in one embodiment, the present invention provides a method of amplifying a segment of a nucleotide sequence encoding DMXL1, comprising: a) choosing a first oligonucleotide primer from a nucleic acid sequence comprising, consisting essentially of or consisting of the nucleotide sequence of SEQ ID NO:1, the nucleotide sequence of SEQ ID NO:3 or the nucleotide sequence of SEQ ID NO:5; b) choosing a second oligonucleotide primer from a nucleic acid sequence comprising, consisting essentially of or consisting of the nucleotide sequence of SEQ ID NO:1, the nucleotide sequence of SEQ ID NO:3 or the nucleotide sequence of SEQ ID NO:5 that differs in nucleotide sequence from the first oligonucleotide primer; c) adding said first oligonucleotide primer and said second oligonucleotide primer to a nucleic acid sample; and d) amplifying a segment of the nucleotide sequence encoding DMXL1 defined by said first oligonucleotide primer and said second oligonucleotide primer, wherein said nucleic acid sample is from a subject having a phenotype of this invention (e.g., a DMXL-associated mental retardation phenotype).

[0054] Further provided herein is a method of amplifying a segment of a nucleotide sequence encoding DMXL2, comprising: a) choosing a first oligonucleotide primer from a nucleic acid sequence comprising, consisting essentially of, or consisting of the nucleotide sequence of SEQ ID NO:2, the nucleotide sequence of SEQ ID NO:4 or the nucleotide sequence of SEQ ID NO:7; b) choosing a second oligonucleotide primer from a nucleic acid sequence comprising, consisting essentially of, or consisting of the nucleotide sequence of SEQ ID NO:2, the nucleotide sequence of SEQ ID NO:4 or the nucleotide sequence of SEQ ID NO:7 that differs in nucleotide sequence from the first oligonucleotide primer; c) adding said first oligonucleotide primer and said second oligonucleotide primer to a nucleic acid sample; and d) amplifying a segment of the nucleotide sequence encoding DMXL2 defined by said first oligonucleotide primer and said second oligonucleotide primer, wherein said nucleic acid sample is from a subject having a phenotype of this invention (e.g. a DMXL-associated mental retardation phenotype).

[0055] In the amplification methods of this invention, the amplified segment of step (d) above can be about 50, about 100, about 150, about 200, about 250, about 300, about 400, about 500 or about 1000 base pairs in length. Furthermore, the amplified segment can comprise a mutation that disrupts the function of the DMXL1 protein and/or DMXL2 protein. In some embodiments, the primers can be designed according to methods well known in the art to lead to the production of an amplification product only if a mutation is present or only if no mutation is present. The amplification product can be identified, quantitated and/or characterized by methods standard in the art (e.g., hybridization, restriction endonuclease analysis, sequencing, etc.)

[0056] In some embodiments, the first oligonucleotide primer can be at least about 15, 20, 25, 30, 35, 40, 45, 50, 60, 70, 80, 90 or 100 nucleotides in length. In some embodiments, the second oligonucleotide primer can be at least about 15, 20, 25, 30, 35, 40, 45, 50, 60, 70, 80, 90 or 100 nucleotides in length.

[0057] In further aspects, the present invention provides a kit for carrying out the methods of this invention, wherein the kit can comprise primers, probes, primer/probe sets, reagents, buffers, etc., as would be known in the art, for the detection of mutation in the Dmxl1 gene and/or the Dmxl2 gene in a nucleic acid sample from the subject and/or for the detection of mutation in the DMXL1 protein and/or DMXL2 protein in a sample from a subject. For example, a primer or probe can comprise a contiguous nucleotide sequence that is complementary (or sufficiently complementary) to a nucleotide sequence encoding a DMXL1 protein and/or a nucleotide sequence encoding a DMXL2 protein. Such a kit can further comprise blocking probes, labeling reagents, blocking agents, restriction enzymes, antibodies (e.g., secondary antibodies), ligands, immunoglobulin binding agents, sampling devices, positive and negative controls, etc., as would be well known to those of ordinary skill in the art.

[0058] As used herein, “a,” “an” or “the” can mean one or more than one. For example, “a” cell can mean a single cell or a multiplicity of cells.

[0059] Also as used herein, “and/or” refers to and encompasses any and all possible combinations of one or more of the associated listed items, as well as the lack of combinations when interpreted in the alternative (“or”).

[0060] Furthermore, the term “about,” as used herein when referring to a measurable value such as an amount of a compound or agent of this invention, dose, time, temperature, and the like, is meant to encompass variations of ±20%, ±10%, ±5%, ±1%, ±0.5%, or even ±0.1% of the specified amount.

[0061] The term “chromosome region” as used herein refers to a part of a chromosome defined either by anatomical details, especially by banding, or by its linkage groups. The particular chromosome regions of this invention are further defined by the following boundaries.

[0062] Also as used herein, “linked” describes a region of a chromosome that is shared more frequently in family members or members of a population manifesting a particular phenotype and/or affected by a particular disease or disorder, than would be expected or observed by chance, thereby indicating that the gene or genes or other identified marker(s) within the linked chromosome region contain or are associated with an allele that is correlated with the phenotype and/or presence of a disease or disorder, or with an increased or decreased likelihood of the phenotype and/or of the disease or disorder. Once linkage is established, association studies (linkage disequilibrium) can be used to narrow the region of interest or to identify the marker (e.g., allele or haplotype) correlated with the phenotype and/or disease or disorder.

[0063] Furthermore, as used herein, the term “linkage disequilibrium” or “LD” refers to the occurrence in a population of two linked alleles at a frequency higher or lower than expected on the basis of the gene frequencies of the individual genes. Thus, linkage disequilibrium describes a situation where alleles occur together more often than can be accounted for by chance, which indicates that the two alleles are physically close on a DNA strand.

[0064] The term “genetic marker” or “polymorphism” as used herein refers to a characteristic of a nucleotide sequence (e.g., in a chromosome) that is identifiable due to its variability among different subjects (i.e., the genetic marker or polymorphism can be a single nucleotide polymorphism, a restriction fragment length polymorphism, a microsatellite, a deletion of nucleotides, an addition of nucleotides, a substitution of nucleotides, a repeat or duplication of nucleotides, a translocation of nucleotides, and/or an aberrant or alternate splice site resulting in production of a truncated or extended form of a protein, etc., as would be well known to one of ordinary skill in the art).

[0065] A “single nucleotide polymorphism” (SNP) in a nucleotide sequence is a genetic marker that is polymorphic for two (or in some case three or four) alleles. SNPs can be present within a coding sequence of a gene, within noncoding regions of a gene and/or in an intergenic (e.g., intron) region of a gene. A SNP in a coding region in which both forms lead to the same polypeptide sequence is termed synonymous (i.e., a silent mutation) and if a different polypeptide sequence is produced, the alleles of that SNP are non-synonymous. SNPs that are not in protein coding regions can still have effects on gene splicing, transcription factor binding and/or the sequence of non-coding RNA.

[0066] The SNP nomenclature provided herein refers to the official Reference SNP (rs) identification number as assigned to each unique SNP by the National Center for Biotechnological Information (NCBI), which is available in the GenBank® database.

[0067] In some embodiments, the term genetic marker is also intended to describe a phenotypic effect of an allele or haplotype, including for example, an increased or decreased amount of a messenger RNA, an increased or decreased amount of protein, an increase or decrease in the copy number of a gene, production of a defective protein, tissue or organ, etc., as would be well known to one of ordinary skill in the art.

[0068] An “allele” as used herein refers to one of two or more alternative forms of a nucleotide sequence at a given position (locus) on a chromosome. Usually alleles are nucleotides present in a nucleotide sequence that makes up the coding sequence of a gene, but sometimes the term is used to refer to a nucleotide in a non-coding region of a gene. An individual's genotype for a given gene is the set of alleles it happens to possess. As noted herein, an individual can be heterozygous or homozygous for an allele of this invention.

[0069] Also as used herein, a “haplotype” is a set of SNPs on a single chromatid that are statistically associated. It is thought that these associations, and the identification of a few alleles of a haplotype block, can unambiguously identify all other polymorphic sites in its region. The term “haplotype” is also commonly used to describe the genetic constitution of individuals with respect to one member of a pair of allelic genes; sets of single alleles or closely linked genes that tend to be inherited together.

[0070] The terms “increased likelihood” or “increased risk” as used herein define the likelihood or the level of risk that a subject has of having or developing DMXL-associated mental retardation, as compared to a control subject that does not have a mutation in the Dmxl1 gene or the Dmxl2 gene.

[0071] The term “antisense” as used herein is defined as the sequence of a gene which is complementary to the sequence of the gene which encodes the gene product.

[0072] The term “exon” as used herein is defined as a transcribed segment of a gene that is present in a mature messenger RNA molecule.

[0073] The term “exon/intron junction” as used herein is defined as two specific nucleotide locations at which point an intronic sequence is spliced from an RNA transcript.

[0074] The term “idiopathic” as used herein is defined as of unknown cause.

[0075] The term “intron” as used herein is defined as a region of a gene transcribed from a DNA template but subsequently removed by splicing together the segments (exons) which flank it.

[0076] The term “nucleic acid chip technology” as used herein is defined as the method of immobilizing nucleic acid on a microchip for subsequent hybridization analysis.

[0077] The term “pharmacologically effective dose” is the amount of an agent administered to be physiologically significant. An agent is physiologically significant if its presence results in a positive or negative change in the physiology of a recipient mammal.

[0078] The term “polymerase chain reaction” (PCR) is well known in the art and includes the method of amplifying a nucleic acid sequence utilizing two oligonucleotide primers and a thermolabile nucleic acid polymerase.

[0079] The term “reverse transcription-polymerase chain reaction” as used herein is defined as the polymerization of a DNA molecule using an RNA molecule as a template for the purpose of utilizing said DNA molecule as a template for PCR.

[0080] The term “splicing” as used herein is defined as a means of removing intron sequences within a primary RNA transcript in processing of said transcript to a mature messenger RNA.

[0081] The term “suicide gene” as used herein is defined as a gene whose gene product is lethal to a cell upon exposure to a prodrug.

[0082] The term “therapeutically effective” as used herein is defined as the amount of a compound required to improve some symptom associated with a disease. For example, in the treatment of neurodevelopmental disease, a compound which decreases, prevents, delays, or arrests any symptom of the disease would be therapeutically effective. A therapeutically effective amount of a compound is not required to cure a disease but will provide a treatment for a disease.

[0083] The term 3′ untranslated region (3′ UTR) as used herein is defined as the sequence at the 3′ end of a messenger RNA that does not become translated into protein and can include regulatory sequences and sequences important for posttranscriptional processing.

[0084] The term “transcribe” as used herein is defined as the process of generating an RNA transcript molecule using DNA as a template.

[0085] The term “transcript” as used herein is defined as an RNA molecule which has been transcribed from DNA.

[0086] A sample of this invention can be any sample containing nucleic acid and/or protein of a subject, as would be well known to one of ordinary skill in the art. Nonlimiting examples of a sample of this invention include a cell, a body fluid, a tissue, a washing, a swabbing, etc., as would be well known in the art. Nonlimiting examples include white blood cells, saliva and skin cells.

[0087] A subject of this invention is any animal that carries a DMXL1 gene and/or DMXL2 gene as well as animal models (e.g., rats, mice, dogs, nonhuman primates, etc.). In some aspects of this invention, the subject can be a human of any ethnicity or race (e.g., Caucasian; white; European, European-American; Hispanic; Latin-American; black; African; African American; African-European; African-Caribbean; African-Australian; African-Asiatic; Austronesian; Mideastern; Asian; Polynesian; Inuit; etc., as are well known in the art). Furthermore, a subject of this invention can be a fetus, a neonate, an infant, a child, an adolescent, a teenager or an adult. Thus, in some embodiments, it is contemplated that the methods of this invention can be used for prenatal testing of a fetus, as well as for testing of a subject of any age.

[0088] In further aspects of this invention, the subject has a family history of mutation in the DMXL1 gene and/or DMXL2 gene and in some embodiments, the subject does not have a family history of DMXL1 gene and/or DMXL2 gene (i.e., the mutation in the subject is a de novo mutation).

[0089] As used herein, “nucleic acid” encompasses both RNA and DNA, including cDNA, genomic DNA, mRNA, synthetic (e.g., chemically synthesized) DNA and chimeras, fusions and/or hybrids of RNA and DNA. The nucleic acid can be double-stranded or single-stranded. Where single-stranded, the nucleic acid can be a sense strand or an antisense strand. The nucleic acid can be synthesized using oligonucleotide analogs or derivatives (e.g., inosine or phosphorothioate nucleotides, etc.). Such oligonucleotides can be used, for example, to prepare nucleic acids that have altered base-pairing abilities or increased resistance to nucleases.

[0090] An “isolated nucleic acid” is a nucleotide sequence that is not immediately contiguous with nucleotide sequences with which it is immediately contiguous (one on the 5′ end and one on the 3′ end) in the naturally occurring genome of the organism from which it is derived. Thus, in one embodiment, an isolated nucleic acid includes some or all of the 5′ non-coding (e.g., promoter) sequences that are immediately contiguous to a coding sequence. The term therefore includes, for example, a recombinant DNA that is incorporated into a vector, into an autonomously replicating plasmid or virus, or into the genomic DNA of a prokaryote or eukaryote, or which exists as a separate molecule (e.g., a cDNA or a genomic DNA fragment produced by PCR or restriction endonuclease treatment), independent of other sequences. It also includes a recombinant DNA that is part of a hybrid nucleic acid encoding an additional polypeptide or peptide sequence.

[0091] The term “isolated” can refer to a nucleic acid or polypeptide that is substantially free of cellular material, viral material, and/or culture medium (e.g., when produced by recombinant DNA techniques), or chemical precursors or other chemicals (when chemically synthesized). Moreover, an “isolated fragment” is a fragment of a nucleic acid or polypeptide that is not naturally occurring as a fragment and would not be found in the natural state.

[0092] The term “oligonucleotide” refers to a nucleic acid sequence of at least about six nucleotides to about 100 nucleotides, for example, about 15 to about 30 nucleotides, or about 20 to about 25 nucleotides, which can be used, for example, as a primer in a PCR amplification and/or as a probe in a hybridization assay or in a microarray. Oligonucleotides of this invention can be natural or synthetic, e.g., DNA, RNA, PNA, LNA, modified backbones, etc., as are well known in the art.

[0093] The present invention further provides fragments of the nucleic acids of this invention, which can be used, for example, as primers and/or probes. Such fragments or oligonucleotides can be detectably labeled or modified, for example, to include and/or incorporate a restriction enzyme cleavage site when employed as a primer in an amplification (e.g., PCR) assay.

[0094] The detection of a mutation of this invention can be carried out according to various protocols standard in the art and as described herein for analyzing nucleic acid samples and nucleotide sequences, as well as identifying specific nucleotides in a nucleotide sequence.

[0095] For example, nucleic acid can be obtained from any suitable sample from the subject that will contain nucleic acid and the nucleic acid can then be prepared and analyzed according to well-established protocols for the presence of mutations according to the methods of this invention. In some embodiments, analysis of the nucleic acid can be carried by direct sequencing of the nucleotide sequence encoding DMXL1 and/or DMXL2 (e.g., from a coding sequence, a messenger RNA sequence and/or a genomic sequence, including but not limited to a regulatory sequence [e.g., an enhancer sequence, a promoter sequence, a cis sequence that binds transacting factors, etc.), an exon, an intron, an exon/intron junction, a 5′ or 3′ untranslated region and any combination thereof].

[0096] In some embodiments, analysis of the nucleic acid can be carried out by amplification of the region of interest according to amplification protocols well known in the art (e.g., polymerase chain reaction, ligase chain reaction, strand displacement amplification, transcription-based amplification, self-sustained sequence replication (3SR), Qβ replicase protocols, nucleic acid sequence-based amplification (NASBA), repair chain reaction (RCR) and boomerang DNA amplification (BDA), etc.). The amplification product can then be visualized directly in a gel by staining or the product can be detected by hybridization with a detectable probe. When amplification conditions allow for amplification of all allelic types of a genetic marker, the types can be distinguished by a variety of well-known methods, such as hybridization with an allele-specific probe, secondary amplification with allele-specific primers, by restriction endonuclease digestion, and/or by electrophoresis. Thus, the present invention further provides oligonucleotides for use as primers and/or probes for detecting and/or identifying genetic markers according to the methods of this invention.

[0097] Mutations in nucleic acid sequences which encode DMXL1 and/or DMXL2 proteins can be detected in a variety of methods known to those in the art including by sequencing, probe, nucleic acid hybridization, PCR, nucleic acid chip hybridization, electrophoresis, or fluorescent in situ hybridization (FISH). Sequencing methods are common laboratory procedures known to many in the art and would be able to detect the exact nature of the mutation. In addition, mutation could be detected by probe. For instance, one skilled in the art would be aware that a fluorescent tag could be specific for binding of a mutation and could be exposed to, for instance, glass beads coated with nucleic acids containing potential mutations. Upon binding of the tag to the mutation in question, a change in fluorescence (such as creation of fluorescence, increase in intensity, or partial or complete quenching) could be indicative of the presence of that mutation. Nucleic acid hybridization including. Southern or Northern blot assays could be utilized to detect mutations such as those involved in alteration of large regions of the sequence or of those involved in alteration of a sequence containing a restriction endonuclease site.

[0098] Hybridization is detected by a variety of ways including radioactivity, color change, light emission, or fluorescence. PCR could also be used to amplify a region suspected to contain a mutation and the resulting amplified region could either be subjected to sequencing or to restriction digestion analysis in the event that mutation was responsible for creating or removing a restriction endonuclease site. The mutation could be identified through an RNA species from the gene by RT-PCR methods which are well known in the art.

[0099] One skilled in the art would also know that a specific method of nucleic acid hybridization could be utilized in the form of nucleic acid chip hybridization in which nucleic acids are present on a immobilized surface such as a microchip or microchips and are subjected to hybridization techniques sensitive enough to detect minor changes in sequences; a variety of detection methods could be used including light emission, fluorescence, color change, or radioactivity. Electrophoresis could be employed to detect mutations of the sequence either by mobility changes or in conjunction with another method of detecting a mutation such as with sequencing or by PCR. Finally, one skilled in the art would be aware that FISH is a proficient technique for detecting large regions of sequences on chromosomes which have been deleted or rearranged.

[0100] In some embodiments, he use of a probe or primer of between 13 and 100 nucleotides, between 17 and 100 nucleotides in length, or in some aspects of the invention up to 1-2 kilobases or more in length, allows the formation of a duplex molecule that is both stable and selective. Molecules having complementary sequences over contiguous stretches greater than 20 bases in length are generally preferred, to increase stability and/or selectivity of the hybrid molecules obtained. One will generally prefer to design nucleic acid molecules for hybridization having one or more complementary sequences of 20 to 30 nucleotides, or even longer where desired. Such fragments may be readily prepared, for example, by directly synthesizing the fragment by chemical means or by introducing selected sequences into recombinant vectors for recombinant production.

[0101] Accordingly, the nucleotide sequences of the invention may be used for their ability to selectively form duplex molecules with complementary stretches of DNAs and/or RNAs or to provide primers for amplification of DNA or RNA from samples. Depending on the application envisioned, one would desire to employ varying conditions of hybridization to achieve varying degrees of selectivity of the probe or primers for the target sequence.

[0102] For applications requiring high selectivity, one will typically desire to employ relatively high stringency conditions to form the hybrids. For example, relatively low salt and/or high temperature conditions, such as provided by about 0.02M to about 0.10M NaCl at temperatures of about 50° C. to about 70° C. Such high stringency conditions tolerate little, if any, mismatch between the probe or primers and the template or target strand and would be particularly suitable for isolating specific genes or for detecting specific mRNA transcripts. It is generally appreciated that conditions can be rendered more stringent by the addition of increasing amounts of formamide.

[0103] For certain applications, it is appreciated that lower stringency conditions are preferred. Under these conditions, hybridization may occur even though the sequences of the hybridizing strands are not perfectly complementary, but are mismatched at one or more positions. Conditions may be rendered less stringent by increasing salt concentration and/or decreasing temperature. For example, a medium stringency condition could be provided by about 0.1 to 0.25M NaCl at temperatures of about 37° C. to about 55° C., while a low stringency condition could be provided by about 0.15M to about 0.9M salt, at temperatures ranging from about 20° C. to about 55° C. Hybridization conditions can be readily manipulated depending on the desired results.

[0104] In other embodiments, hybridization may be achieved under conditions of, for example, 50 mM Tris-HCl (pH 8.3), 75 mM KCl, 3 mMMgCl₂, 1.0 mM dithiothreitol, at temperatures between approximately 20° C. to about 37° C. Other hybridization conditions utilized could include approximately 10 mM Tris-HCl (pH 8.3), 50 mM KCl, 1.5 mM MgCl₂, at temperatures ranging from approximately 40° C. to about 72° C.

[0105] In certain embodiments, it will be advantageous to employ nucleic acids of defined sequences of the present invention in combination with an appropriate means, such as a label, for determining hybridization. A wide variety of appropriate indicator means are known in the art, including fluorescent, radioactive, enzymatic or other ligands, such as avidin/biotin, which are capable of being detected. In some embodiments, one may desire to employ a fluorescent label or an enzyme tag such as urease, alkaline phosphatase or peroxidase, instead of radioactive or other environmentally undesirable reagents. In the case of enzyme tags, colorimetric indicator substrates are known that can be employed to provide a detection means that is visibly or spectrophotometrically detectable, to identify specific hybridization with complementary nucleic acid containing samples.

[0106] In general, it is envisioned that the probes or primers described herein will be useful as reagents in solution hybridization, as in PCR™, for detection of expression of corresponding genes, as well as in embodiments employing a solid phase. In embodiments involving a solid phase, the test DNA (or RNA) is adsorbed or otherwise affixed to a selected matrix or surface. This fixed, single-stranded nucleic acid is then subjected to hybridization with selected probes under desired conditions. The conditions selected will depend on the particular circumstances (depending, for example, on the G+C content, type of target nucleic acid, source of nucleic acid, size of hybridization probe, etc.). Optimization of hybridization conditions for the particular application of interest is well known to those of skill in the art. After washing of the hybridized molecules to remove non-specifically bound probe molecules, hybridization is detected, and/or quantified, by determining the amount of bound label. Representative solid phase hybridization methods are disclosed in U.S. Pat. Nos. 5,843,663, 5,900,481 and 5,919,626. Other methods of hybridization that may be used in the practice of the present invention are disclosed in U.S. Pat. Nos. 5,849,481, 5,849,486 and 5,851,772. The relevant portions of these and other references identified in this section of the Specification are incorporated herein by reference.

[0107] Nucleic acids used as a template for amplification may be isolated from cells, tissues or other samples according to standard methodologies (Sambrook et al., 1989). In certain embodiments, analysis is performed on whole cell or tissue homogenates or biological fluid samples without substantial purification of the template nucleic acid. The nucleic acid may be genomic DNA or fractionated or whole cell RNA. Where RNA is used, it may be desired to first convert the RNA to a complementary DNA.

[0108] The term “primer,” as used herein, is meant to encompass any nucleic acid that is capable of priming the synthesis of a nascent nucleic acid in a template-dependent process. Typically, primers are oligonucleotides from ten to twenty and/or thirty base pairs in length, but longer sequences can be employed. Primers may be provided in double-stranded and/or single-stranded form, although the single-stranded form is preferred.

[0109] Pairs of primers designed to selectively hybridize to nucleic acids encoding DXML1 and/or DMXL2 are contacted with the template nucleic acid under conditions that permit selective hybridization. Depending upon the desired application, high stringency hybridization conditions may be selected that will only allow hybridization to sequences that are completely complementary to the primers. In other embodiments, hybridization may occur under reduced stringency to allow for amplification of nucleic acids that contain one or more mismatches with the primer sequences. Once hybridized, the template-primer complex is contacted with one or more enzymes that facilitate template-dependent nucleic acid synthesis. Multiple rounds of amplification, also referred to as “cycles,” are conducted until a sufficient amount of amplification product is produced.

[0110] The amplification product may be detected or quantified. In certain applications, the detection may be performed by visual means. Alternatively, the detection may involve indirect identification of the product via chemiluminescence, radioactive scintigraphy of incorporated radiolabel or fluorescence label or even via a system using electrical and/or thermal impulse signals (e.g., Affymax technology).

[0111] A number of template dependent processes are available to amplify the oligonucleotide sequences present in a given template sample. One of the best known amplification methods is the polymerase chain reaction (referred to as PCR™) which is described in detail in U.S. Pat. Nos. 4,683,195, 4,683,202 and 4,800,159, each of which is incorporated herein by reference in its entirety.

[0112] A reverse transcriptase PCR™ amplification procedure may be performed to quantify the amount of mRNA amplified. Methods of reverse transcribing RNA into cDNA are well known and described, e.g., in Sambrook et al., 1989. Alternative methods for reverse transcription utilize thermostable DNA polymerases. These methods are described in PCT Publication No. WO 90/07641. Polymerase chain reaction methodologies are well known in the art. Representative methods of RT-PCR are described in U.S. Pat. No. 5,882,864.

[0113] Another method for amplification is ligase chain reaction (“LCR”), disclosed, e.g., in European Application No. 320 308, incorporated herein by reference in its entirety. U.S. Pat. No. 4,883,750 describes a method similar to LCR for binding probe pairs to a target sequence. A method based on PCR™ and oligonucleotide ligase assay (OLA), disclosed in U.S. Pat. No. 5,912,148, may also be used.

[0114] Alternative methods for amplification of target nucleic acid sequences that may be used in the practice of the present invention are disclosed in U.S. Pat. Nos. 5,843,650, 5,846,709, 5,846,783, 5,849,546, 5,849,497, 5,849,547, 5,858,652, 5,866,366, 5,916,776, 5,922,574, 5,928,905, 5,928,906, 5,932,451, 5,935,825, 5,939,291 and 5,942,391, GB Application No. 2 202 328, and in PCT Application No. PCT/US89/01025, each of which is incorporated herein by reference in its entirety.

[0115] Qbeta replicase, described in PCT Application No. PCT/US87/00880, may also be used as an amplification method in the present invention. In this method, a replicative sequence of RNA that has a region complementary to that of a target is added to a sample in the presence of an RNA polymerase. The polymerase will copy the replicative sequence which may then be detected.

[0116] An isothermal amplification method, in which restriction endonucleases and ligases are used to achieve the amplification of target molecules that contain nucleotide 5′-[alpha-thio]-triphosphates in one strand of a restriction site may also be useful in the amplification of nucleic acids in the present invention. Strand Displacement Amplification (SDA), disclosed in U.S. Pat. No. 5,916,779, is another method of carrying out isothermal amplification of nucleic acids which involves multiple rounds of strand displacement and synthesis, i.e., nick translation.

[0117] Other nucleic acid amplification procedures include transcription-based amplification systems (TAS), including nucleic acid sequence based amplification (NASBA) and 3SR (Kwoh et al., 1989; Gingeras et al., PCT Application WO 88/10315, incorporated herein by reference in their entirety). Davey et al., European Application No. 329 822, disclose a nucleic acid amplification process involving cyclically synthesizing single-stranded RNA (“ssRNA”), ssDNA, and double-stranded DNA (dsDNA), which may be used in accordance with the present invention.

[0118] Miller et al., PCT Publication No. WO 89/06700 (incorporated herein by reference in its entirety), discloses a nucleic acid sequence amplification scheme based on the hybridization of a promoter region/primer sequence to a target single-stranded DNA (“ssDNA”) followed by transcription of many RNA copies of the sequence. This scheme is not cyclic, i.e., new templates are not produced from the resultant RNA transcripts. Other amplification methods include “RACE” and “one-sided PCR” (Frohman, 1990; Ohara et al., 1989).

[0119] Following any amplification, it may be desirable to separate the amplification product from the template and/or the excess primer. In one embodiment, amplification products are separated by agarose, agarose-acrylamide or polyacrylamide gel electrophoresis using standard methods (Sambrook et al., 1989). Separated amplification products may be cut out and eluted from the gel for further manipulation. Using low melting point agarose gels, the separated band may be removed by heating the gel, followed by extraction of the nucleic acid.

[0120] Separation of nucleic acids may also be effected by chromatographic techniques known in art. There are many kinds of chromatography which may be used in the practice of the present invention, including adsorption, partition, ion-exchange, hydroxylapatite, molecular sieve, reverse-phase, column, paper, thin-layer, and gas chromatography as well as HPLC.

[0121] In certain embodiments, the amplification products are visualized. A typical visualization method involves staining of a gel with ethidium bromide and visualization of bands under UV light. Alternatively, if the amplification products are integrally labeled with radio- or fluorometrically-labeled nucleotides, the separated amplification products can be exposed to x-ray film or visualized under the appropriate excitatory spectra.

[0122] In one embodiment, following separation of amplification products, a labeled nucleic acid probe is brought into contact with the amplified marker sequence. The probe preferably is conjugated to a chromophore but may be radiolabeled. In another embodiment, the probe is conjugated to a binding partner, such as an antibody or biotin, or another binding partner carrying a detectable moiety.

[0123] In particular embodiments, detection is by Southern blotting and hybridization with a labeled probe. The techniques involved in Southern blotting are well known to those of skill in the art. One example of the foregoing is described in U.S. Pat. No. 5,279,721, incorporated by reference herein, which discloses an apparatus and method for the automated electrophoresis and transfer of nucleic acids. The apparatus permits electrophoresis and blotting without external manipulation of the gel.

[0124] Mutations can be detected in the amino acid sequence of the DMXL1 protein and/or DMXL2 protein through the following methods: sequencing, mass spectrometry, by molecular weight, with antibodies, through increased expression of a target gene, by chromosomal coating or by alterations in methylation of DNA patterns. Examples of alterations include a change, loss, or addition of an amino acid, truncation or fragmentation of the protein. Alterations can increase degradation of the protein, can change conformation of the protein, or can be present in a hydrophobic or hydrophilic domain of the protein. The alteration need not be in an active site of the protein to have a deleterious effect on its function or structure, or both. Alteration can include modifications to the protein such as phosphorylation, myristilation, acetylation, or methylation. Sequencing of the protein or a fragment thereof directly by methods well known in the art would identify specific amino acid alterations. Alterations in protein sequences can be detected by analyzing either the entire protein or fragments of the protein and subjecting them to mass spectrometry, which would be able to detect even minor changes in molecular weight. Additionally, antibodies can be used to detect mutations in said proteins if the epitope includes the particular site that has been mutated. Antibodies can be used to detect mutations in the protein by immunoblotting, with in situ methods, or by immunoprecipitation. Antibodies to the methyl-CpG-binding domain containing protein on immunoblots may alternatively recognize any epitope of the protein and could detect truncations or modifications of the protein that would affect electrophoretic mobility, including phosphorylation or myristilation.

[0125] The term “vector” refers to a carrier nucleic acid molecule into which a nucleic acid sequence can be inserted for introduction into a cell where it can be replicated. A nucleic acid sequence can be “exogenous,” which means that it is foreign to the cell into which the vector is being introduced or that the sequence is homologous to a sequence in the cell but in a position within the host cell nucleic acid in which the sequence is ordinarily not found. The nucleic acid sequence can also be exogenous to the vector. Vectors include plasmids, cosmids, viruses (bacteriophage, animal viruses, and plant viruses), and artificial chromosomes (e.g., YACs). One of skill in the art would be well equipped to construct a vector through standard recombinant techniques, which are described, e.g., in Maniatis et al., 1988 and Ausubel et al., 1994, both incorporated herein by reference.

[0126] The term “expression vector” refers to a vector containing a nucleic acid sequence coding for at least part of a gene product capable of being transcribed. In some cases, RNA molecules are then translated into a protein, polypeptide, or peptide. In other cases, these sequences are not translated, for example, in the production of antisense molecules or ribozymes. Expression vectors can contain a variety of “control sequences,” which refer to nucleic acid sequences necessary for the transcription and possibly translation of an operably linked coding sequence in a particular host organism. In addition to control sequences that govern transcription and translation, vectors and expression vectors may contain nucleic acid sequences that serve other functions as well and are described infra.

[0127] A “promoter” is a control sequence that is a region of a nucleic acid sequence at which initiation and rate of transcription are controlled. It may contain genetic elements at which regulatory proteins and molecules may bind such as RNA polymerase and other transcription factors. The phrases “operatively positioned,” “operatively linked,” “under control,” and “under transcriptional control” mean that a promoter is in a correct functional location and/or orientation in relation to a nucleic acid sequence to control transcriptional initiation and/or expression of that sequence. A promoter may or may not be used in conjunction with an “enhancer,” which refers to a cis-acting regulatory sequence involved in the transcriptional activation of a nucleic acid sequence.

[0128] A promoter may be one naturally associated with a gene or sequence, as may be obtained by isolating the 5′ non-coding sequences located upstream of the coding segment and/or exon. Such a promoter can be referred to as “endogenous.” Similarly, an enhancer may be one naturally associated with a nucleic acid sequence, located either downstream or upstream of that sequence. Alternatively, certain advantages will be gained by positioning the coding nucleic acid segment under the control of a recombinant or heterologous promoter, which refers to a promoter that is not normally associated with a nucleic acid sequence in its natural environment. A recombinant or heterologous enhancer refers also to an enhancer not normally associated with a nucleic acid sequence in its natural environment. Such promoters or enhancers may include promoters or enhancers of other genes, and promoters or enhancers isolated from any other prokaryotic, viral, or eukaryotic cell, and promoters or enhancers not “naturally occurring,” i.e., containing different elements of different transcriptional regulatory regions, and/or mutations that alter expression. In addition to producing nucleic acid sequences of promoters and enhancers synthetically, sequences may be produced using recombinant cloning and/or nucleic acid amplification technology, including PCR™, in connection with the compositions disclosed herein (see U.S. Pat. No. 4,683,202; U.S. Pat. No. 5,928,906, each incorporated herein by reference). Furthermore, it is contemplated the control sequences that direct transcription and/or expression of sequences within non-nuclear organelles such as mitochondria, chloroplasts, and the like, can be employed as well.

[0129] The promoters employed may be constitutive, tissue-specific, inducible, and/or useful under the appropriate conditions to direct high level expression of the introduced DNA segment, such as is advantageous in the large-scale production of recombinant proteins and/or peptides. The promoter may be heterologous or endogenous.

[0130] The present invention further provides a method of identifying an effective and/or appropriate (i.e., for a given subject's particular condition or status) treatment regimen for a subject with DMXL-associated mental retardation, comprising detecting a mutation in the DMXL1 gene and/or DMXL2 gene of the subject, wherein the mutation is correlated with an effective and/or appropriate treatment regimen for DMXL-associated mental retardation according to protocols as described herein and as are well known in the art.

[0131] Also provided is a method of identifying an effective and/or appropriate treatment regimen for a subject with DMXL-associated mental retardation, comprising: a) correlating the presence of one or more DMXL1 and/or DMXL2 mutations of this invention in a test subject or population of test subjects with DMXL-associated mental retardation for whom an effective and/or appropriate treatment regimen has been identified; and b) detecting the mutation(s) of step (a) in the subject, thereby identifying an effective and/or appropriate treatment regimen for the subject.

[0132] Further provided is a method of correlating a DMXL1 and/or DMXL2 mutation of this invention with an effective and/or appropriate treatment regimen for DMXL-associated mental retardation, comprising: a) detecting in a subject or a population of subjects with DMXL-associated mental retardation and for whom an effective and/or appropriate treatment regimen has been identified, the presence of one or more mutations of this invention; and b) correlating the presence of the one or more mutations of step (a) with an effective treatment regimen for DMXL-associated mental retardation.

[0133] Examples of treatment regimens for subjects having one or more of the clinical features of the phenotype of DMXL-associated mental retardation are well known in the art. Subjects who respond well to particular treatment protocols can be analyzed for specific mutations in the DMXL1 gene and/or DMXL2 gene and a correlation can be established according to the methods provided herein. Alternatively, subjects who respond poorly to a particular treatment regimen can also be analyzed for particular mutations in the DMXL1 gene and/or DMXL2 gene correlated with the poor response. Then, a subject who is a candidate for treatment for the clinical symptoms and features of DMXL-associated mental retardation can be assessed for the presence of the appropriate mutation(s) and the most effective and/or appropriate treatment regimen can be provided.

[0134] In some embodiments, the methods of correlating DMXL1 and/or DMXL2 mutations with treatment regimens of this invention can be carried out using a computer database. Thus the present invention provides a computer-assisted method of identifying a proposed treatment for DMXL-associated mental retardation. The method involves the steps of (a) storing a database of biological data for a plurality of subjects, the biological data that is being stored including for each of said plurality of subjects, for example, (i) a treatment type, (ii) at least one DMXL1 mutation associated with DMXL-associated mental retardation, and (iii) at least one clinical feature or symptom of DMXL-associated mental retardation from which treatment efficacy can be determined; and then (b) querying the database to determine the dependence on said mutation(s) of the effectiveness of a treatment type in treating DMXL-associated mental retardation, to thereby identify a proposed treatment as an effective and/or appropriate treatment for a subject having DMXL-associated mental retardation.

[0135] In one embodiment, treatment information for a subject is entered into the database (through any suitable means such as a window or text interface), DMXL1 and/or DMXL2 mutation information for that subject is entered into the database, and disease progression/clinical status information is entered into the database. These steps are then repeated until the desired number of subjects has been entered into the database. The database can then be queried to determine whether a particular treatment is effective for subjects carrying a particular mutation, not effective for subjects carrying a particular mutation, etc. Such querying can be carried out prospectively or retrospectively on the database by any suitable means, but is generally done by statistical analysis in accordance with known techniques, as described herein.

[0136] Another embodiment of the present invention is a method of treating a subject with DMXL-associated mental retardation, comprising the step of in vivo introduction into said subject a therapeutically effective amount of a nucleic acid (e.g., a heterologous or exogenous nucleic acid) encoding a DMXL1 protein and/or DMXL2 protein. An alternative method of the present invention is treating a subject with DMXL-associated mental retardation, comprising the steps of introducing ex vivo into a cell a therapeutically effective amount of a nucleic acid (e.g., a heterologous or exogenous nucleic acid) encoding a DMXL1 protein and/or DMXL2 protein and introducing said transformed cell into said subject. In some embodiments, said introduction also includes introduction of a suicide gene. Such gene therapy methods are well known in the art and one of ordinary skill would be able to select from a wide variety of gene therapy vectors and protocols for delivering a nucleic acid encoding a DMXL1 protein and/or DMXL2 protein to a subject in need thereof and target the delivery of the nucleic acid appropriately to achieve the desired therapeutic effect.

[0137] The terms “exogenous” and/or “heterologous” as used herein can include a nucleic acid molecule or nucleotide sequence that is not naturally occurring in the nucleic acid construct and/or delivery vector (e.g., virus delivery vector) in which it is contained and can also include a nucleotide sequence that is placed into a non-naturally occurring environment and/or position relative to other nucleotide sequences (e.g., by association with a promoter or coding sequence with which it is not naturally associated). A heterologous or exogenous nucleotide sequence or amino acid sequence of this invention can be any heterologous nucleotide sequence and/or amino acid sequence that has been introduced into a cell and can include a nucleotide sequence and/or amino acid sequence for which an original version is already present in the cell and the heterologous nucleotide sequence and/or amino acid sequence is a duplicate of the original naturally occurring version, and/or the heterologous nucleotide sequence or amino acid sequence can be introduced into a cell that does not naturally comprise the same nucleotide sequence and/or amino acid sequence.

[0138] The nucleic acid of this invention can be present in a vector and such a vector can be present in a cell. Any suitable vector is encompassed in the embodiments of this invention, including, but not limited to, nonviral vectors (e.g., plasmids, poloxymers and liposomes), viral vectors and synthetic biological nanoparticles (BNP) (e.g., synthetically designed from different adeno-associated viruses, as well as other parvoviruses).

[0139] It will be apparent to those skilled in the art that any suitable vector can be used to deliver a heterologous nucleic acid of this invention. The choice of delivery vector can be made based on a number of factors known in the art, including age and species of the target host, in vitro vs. in vivo delivery, level and persistence of expression desired, intended purpose (e.g., for therapy or polypeptide production), the target cell or organ, route of delivery, size of the isolated nucleic acid, safety concerns, and the like.

[0140] Suitable vectors also include virus vectors (e.g., retrovirus, alphavirus; vaccinia virus; adenovirus, adeno-associated virus, or herpesvirus), lipid vectors, poly-lysine vectors, synthetic polyamino polymer vectors that are used with nucleic acid molecules, such as plasmids, and the like.

[0141] Any viral vector can be used in the present invention. Examples of such viral vectors include, but are not limited to, vectors derived from: Adenoviridae; Birnaviridae; Bunyaviridae; Caliciviridae, Capillovirus group; Carlavirus group; Carmovirus virus group; Group Caulimovirus; Closterovirus Group; Commelina yellow mottle virus group; Comovirus virus group; Coronaviridae; PM2 phage group; Corcicoviridae; Group Cryptic virus; group Cryptovirus; Cucumovirus virus group Family ([PHgr]6 phage group; Cysioviridae; Group Carnation ringspot; Dianthovirus virus group; Group Broad bean wilt; Fabavirus virus group; Filoviridae; Flaviviridae; Furovirus group; Group Geminivirus; Group Giardiavirus; Hepadnaviridae; Herpesviridae; Hordeivirus virus group; Illarvirus virus group; Inoviridae; Iridoviridae; Leviviridae; Lipothrixviridae; Luteovirus group; Marafivirus virus group; Maize chlorotic dwarf virus group; icroviridae; Myoviridae; Necrovirus group; Nepovirus virus group; Nodaviridae; Orthomyxoviridae; Papovaviridae; Paramyxoviridae; Parsnip yellow fleck virus group; Partitiviridae; Parvoviridae; Pea enation mosaic virus group; Phycodnaviridae; Picornaviridae; Plasmaviridae; Prodoviridae; Polydnaviridae; Potexvirus group; Potyvirus; Poxviridae; Reoviridae; Retroviridae; Rhabdoviridae; Group Rhizidiovirus; Siphoviridae; Sobemovirus group; SSV 1-Type Phages; Tectiviridae; Tenuivirus; Tetraviridae; Group Tobamovirus; Group Tobravirus; Togaviridae; Group Tombusvirus; Group Torovirus; Totiviridae; Group Tymovirus; and Plant virus satellites. Protocols for producing recombinant viral vectors and for using viral vectors for nucleic acid delivery can be found, e.g., in Current Protocols in Molecular Biology, Ausubel, F. M. et al. (eds.) Greene Publishing Associates, (1989) and other standard laboratory manuals (e.g., Vectors for Gene Therapy. In: Current Protocols in Human Genetics. John Wiley and Sons, Inc.: 1997).

[0142] Nonlimiting examples of vectors employed in the methods of this invention include any nucleotide construct used to deliver nucleic acid into cells, e.g., a plasmid, a nonviral vector or a viral vector, such as a retroviral vector which can package a recombinant retroviral genome (see e.g., Pastan et al., Proc. Natl. Acad. Sci. U.S.A. 85:4486 (1988); Miller et al., Mol. Cell. Biol. 6:2895 (1986)). For example, the recombinant retrovirus can then be used to infect and thereby deliver a nucleic acid of the invention to the infected cells. The exact method of introducing the altered nucleic acid into mammalian cells is, of course, not limited to the use of retroviral vectors. Other techniques are widely available for this procedure including the use of adenoviral vectors (Mitani et al., Hum. Gene Ther. 5:941-948, 1994), adeno-associated viral (AAV) vectors (Goodman et al., Blood 84:1492-1500, 1994), lentiviral vectors (Naldini et al., Science 272:263-267, 1996), pseudotyped retroviral vectors (Agrawal et al., Exper. Hematol. 24:738-747, 1996), and any other vector system now known or later identified. Also included are chimeric viral particles, which are well known in the art and which can comprise viral proteins and/or nucleic acids from two or more different viruses in any combination to produce a functional viral vector. Chimeric viral particles of this invention can also comprise amino acid and/or nucleotide sequence of non-viral origin (e.g., to facilitate targeting of vectors to specific cells or tissues and/or to induce a specific immune response). The present invention also provides “targeted” virus particles (e.g., a parvovirus vector comprising a parvovirus capsid and a recombinant AAV genome, wherein an exogenous targeting sequence has been inserted or substituted into the parvovirus capsid).

[0143] Physical transduction techniques can also be used, such as liposome delivery and receptor-mediated and other endocytosis mechanisms (see, for example, Schwartzenberger et al., Blood 87:472-478, 1996). This invention can be used in conjunction with any of these and/or other commonly used nucleic acid transfer methods. Appropriate means for transfection, including viral vectors, chemical transfectants, or physico-mechanical methods such as electroporation and direct diffusion of DNA, are described by, for example, Wolff et al., Science 247:1465-1468, (1990); and Wolff, Nature 352:815-818, (1991).

[0144] Thus, administration of the nucleic acid of this invention can be achieved by any one of numerous, well-known approaches, for example, but not limited to, direct transfer of the nucleic acids, in a plasmid or viral vector, or via transfer in cells or in combination with carriers such as cationic liposomes. Such methods are well known in the art and readily adaptable for use in the methods described herein. Furthermore, these methods can be used to target certain diseases and tissues, organs and/or cell types and/or populations by using the targeting characteristics of the carrier, which would be well known to the skilled artisan. It would also be well understood that cell and tissue specific promoters can be employed in the nucleic acids of this invention to target specific tissues and cells and/or to treat specific diseases and disorders.

[0145] An effective amount of a composition of this invention will vary from composition to composition and subject to subject, and will depend upon a variety of factors such as age, species, gender, weight, overall condition of the subject and the particular disease or disorder to be treated. An effective amount can be determined in accordance with routine pharmacological procedures known to those of ordinary skill in the art. In some embodiments, a dose ranging from about 0.1 μg/kg to about 1 gm/kg will have therapeutic efficacy. In embodiments employing viral vectors for delivery of the nucleic acid of this invention, viral doses can be measured to include a particular number of virus particles or plaque forming units (pfu) or infectious particles, depending on the virus employed. For example, in some embodiments, particular unit doses can include about 10³, 10⁴, 10⁵, 10⁶, 10⁷, 10⁸, 10⁹, 10¹⁰, 10¹¹, 10¹², 10¹³ or 10¹⁴ pfu or infectious particles.

[0146] The frequency of administration of a composition of this invention can be as frequent as necessary to impart the desired therapeutic effect. For example, the composition can be administered one, two, three, four or more times per day, one, two, three, four or more times a week, one, two, three, four or more times a month, one, two, three or four times a year and/or as necessary to control a particular condition and/or to achieve a particular effect and/or benefit. In some embodiments, one, two, three or four doses over the lifetime of a subject can be adequate to achieve the desired therapeutic effect. The amount and frequency of administration of the composition of this invention will vary depending on the particular condition being treated or to be prevented and the desired therapeutic effect.

[0147] The present invention is more particularly described in the following examples that are intended as illustrative only since numerous modifications and variations therein will be apparent to those skilled in the art.

### EXAMPLES

### Example I

### Studies on DMXL1 and DMXL2 Mutations

[0148] Initial observation of a mentally retarded familial adenomatous polyposis (FAP) patient with deletion of the APC gene associated with FAP. A 5-year-old child was referred to the DNA diagnostic laboratory for mutation analysis of the APC gene associated with FAP. Full sequencing of the coding region of the APC gene did not identify any disease-causing mutation. Further analysis was performed to detect gross rearrangements in the APC gene by real-time PCR. This analysis showed the deletion of one copy of the APC gene. Subsequent fluorescence in situ hybridization (FISH) analysis identified the breakpoints of this deletion as 5q22-5q23.2. This patient was reported to be mentally retarded and had additional clinical features, such as obesity, hypotonia, hoarse cry, high prominent forehead, flat temporal regions, and thin and arched eyebrows. Subsequently, two additional patients aged 3 and 10 years were identified with a complete deletion of one copy of the APC gene that also encompassed the DMXL1 gene. The clinical features of these two patients were similar to the first identified patient.

[0149] To date, about 70 genes have been mapped within the deleted region, with the APC gene being the most clinically relevant gene at 5q22.2 [45, 46]. The MCC gene, at 5q22.2, also plays a role in colorectal cancer [47]. The Dmx-like 1 (DMXL1) gene at 5q23.1 is expressed in a variety of tissues and seems to have an important regulatory function [48]. A “de novo” interstitial deletion 5q22q23.2 in a 34-year-old woman exhibiting schizophrenia has been described by Bennett et al. [49]. The patient was also moderately mentally retarded and showed discrete dysmorphic features, such as delays in speech and motor development, low-set ears, low posterior hairline, and tapered fingers. Another case described by Raedle et al. showed some characteristics similar to those of the patients described herein [50]. The patient described by Raedle et al. was not affected by schizophrenia or any other major psychosis. Garcia-Minaur et al. concluded that there is a general phenotype for proximal deletions that encompasses the 5q22.3q23.2 region [51]. Individuals with distal deletions encompassing the q22-q31 region also share a consistent phenotype. Herrera et al. and Hockey et al. also described mentally retarded individuals with 5q deletions who also exhibited multiple developmental abnormalities and FAP. These data suggest that genes responsible for normal mental function are included in the region [52].

[0150] DMXL1 gene. The DmX gene was isolated from the X chromosome of Drosophila melanogaster. TBLASTN searches of the dbEST databases revealed sequences with a high level of similarity to DmX in a variety of different species, including insects, nematodes, and mammals, which shows that DmX is an evolutionarily highly conserved gene [48]. The human ortholog of DmX, Dmx-like 1 (DMXL1), is localized to 5q23.1 with a genomic size of ˜176 kb. The human DMXL1 gene contains 43 exons and codes for a large mRNA of 11 kb with an open reading frame of 3027 amino acids. The putative protein belongs to the superfamily of WD-repeat proteins, which have mostly regulatory functions. The DMXL1 protein contains an exceptionally large number of WD-repeat units. The DMXL1 gene is located on chromosome 5q23.1 as determined by radiation hybrid mapping and FISH. The DMXL1 gene was recently reported to be down regulated in astrocytomas, though the significance of this down regulation is unknown [53].

[0151] DMXL1 gene and its paralogous gene DMXL2. RAB-3 is a 12 WD-domain protein, which binds both GDP/GTP exchange protein and GTPase-activating protein [54-56]. These domains are found in a variety of proteins and are likely to be involved in protein-protein interactions. RAB3 shows a domain structure similar to that of DMXL1, which has 10 WD domains, and has been renamed DMXL2 [56]. Phylogenetic analysis confirms that both genes are paralogs, with invertebrate sequences basal to vertebrate DMXL1 and DMXL2. Thus, the duplication event that gave rise to DMXL1 and DMXL2 most likely involved two rounds of “en bloc” duplication in early vertebrate ancestry [57].

[0152] The DMXL2 gene at 15q21.2 is reported to be deleted in 15q21 syndrome [58-62]. Interstitial deletions of chromosome 15q not involving the PWS/AS region are uncommon and poorly characterized [59, 63]. Few cases defined at the cytogenetic level have been reported with 15q21 deletions, and characteristic facial dysmorphisms are present in all of them. The DMXL2 gene is localized to 15q21.2 with a genomic size of ˜163 kb. The human DMXL2 gene contains 43 exons and codes for a large mRNA of 9 kb with an open reading frame of 3036 amino acids. DMXL1 and DMXL2 are 54% identical and 69% similar at the amino acid level and contain WD repeats. The DMXL1 and DMXL2 proteins have not been crystallized, therefore the structure of these proteins is not known.

[0153] Based on the clinical presentation of the patients described herein and of patients described in the literature, mutation analysis of the DMXL1 and DMXL2 genes was carried out for patients who had a PWS-like presentation and had previously tested negative for the methylation assay. Prader-Willi syndrome (PWS) is a developmental disorder characterized by mental retardation or learning disability, infantile hypotonia and poor suck reflex, growth retardation, and childhood onset of pronounced hyperphagia. Motor milestones and language development are delayed. All individuals have some degree of cognitive impairment (Table 1). A distinctive behavioral phenotype (with temper tantrums, stubbornness, manipulative behavior, and obsessive-compulsive characteristics) is common. PWS is caused by the absence of the paternally derived PWS/AS region of chromosome 15 via one of several genetic mechanisms.

[0154] A total of 114 samples of previously extracted DNA samples were obtained from the Greenwood Genetics Center, NC and the Emory Genetics Laboratory (EGL) and were screened for mutations in the DMXL1 and DMXL2 genes. To date, bidirectional sequencing has been completed of all samples for DMXL1 gene and for 25 samples for mutations in the DMXL2 gene. The DMXL1 and DMXL2 genes are large genes containing 43 exons each. All exons of the DMXL1 gene and the 100-bp flanking intronic region were amplified at a universal PCR cycle and sequenced bidirectionally. Sequences were assembled with a GenBank® database wild-type consensus sequence using Mutation Surveyor software. Eleven novel heterozygous missense variants were identified in the DMXL1 gene, and two novel heterozygous missense variants were identified in the DMXL2 gene (Table 2).

[0155] All mutations were confirmed by re amplifying the targeted exon and resequencing bidirectionally. Mutations were also confirmed by bidirectional sequencing with an alternate primer set. These variants were not found in the dbSNP database. Parental samples have been obtained for three cases and it has been demonstrated that the three missense mutations, R1826C, M1983V and R2056C, were de novo whereas common polymorphisms documented in the dbSNP database were found to be inherited. There is an ongoing process of obtaining parental samples from the remainder of cases to determine whether these missense mutations are inherited or occur de novo. Clinical assessment and follow-up contact of patients and their families for the remainder of cases is also ongoing.

[0156] The 13 variants found are predicted to be deleterious according to the SIFT (sorting tolerant from intolerant), POLYPHEN (polymorphism phenotyping), and PANTHER (protein analysis through evolutionary relationships) prediction programs. These missense variants were not detected in 1800 normal chromosomes. The controls analyzed included 1000 normal Caucasian samples and 800 samples from a mixed ethnic panel, including Chinese, Mexicans, and Asians. These data indicate that mutations in DMXL1 and DMXL2 genes are associated with a novel but previously undescribed syndrome with clinical features including mental retardation.

[0157] Deletion/duplication analysis: A targeted 4-plex 385K comparative genomic hybridization (CGH) array has been designed for detecting single and multiple exon deletions and duplications in DMXL1 and DMXL2 genes. The CGH array includes oligonucleotides for the DMXL1 and DMXL2 genes and several other loci that are known to be associated with a Prader-Willi-like phenotype (Table 3). The CGH array design is exon centric and has an average spacing of five base pairs in the targeted loci. Five wild-type samples have been analyzed on the array. The data for the wild-type samples are robust. No copy number variants (CNVs) were identified in the wild-type samples, but it is expected that CNVs will be identified as the data set gets larger. The CNVs will be compared with the previously documented CNVs in the UCSC database. CGH array analysis will be performed on all DNA samples from the Greenwood Genetics Center, NC and the EGL. This analysis will be performed regardless of the findings from the sequence analysis of the DMXL1 and DMXL2 genes. Performing sequence analysis for the DMXL2 gene and large deletion/duplication analyses for DMXL1 and DMXL2 genes will make the mutation analysis comprehensive. Despite the maturity of sequencing and CGH, an estimated 1-2% of mutations located deep within intronic or promoter regions cannot be identified. An initial study of 15 samples employing CGH showed no deletion.

[0158] Allele-specific methylation analysis. To determine the methylation status of the DMXL1 and DMXL2 gene promoters, a real-time assay was designed. Two allele-specific primer/probe sets have been designed; the first set is labeled with FAM and targeted to the methylated copy, while the second is labeled with HEX and targeted to the unmethylated copy. Real time methylation PCR analysis showed that both the DMXL1 and DMXL2 genes are not imprinted. Another set of primers targeted to exon 5 of the DMXL1 gene and exon 11 of the DMXL2 gene with VIC and NED label was designed to use as an internal gene control. The chromosome 5q22 U2AFBPL gene, which is proximal to the DMXL1 gene and is known to not be imprinted in humans, was an independent assay control. Gain of methylation at the H19 locus on chromosome 11p15.5 implicated in Beckwith-Wiedemann syndrome (BWS) was used as a methylation control.

[0159] Twenty wild-type samples have been analyzed to determine the efficacy of bisulphite treatment and validate the real-time PCR methodology for the U2AFBPL gene and H19 locus. Real time PCR performed on the promoter regions of the DMXL1 and DMXL2 genes showed that these two genes are not imprinted.

[0160] No nonsense or truncating mutations in the DMXL1 or DMXL2 genes have yet been identified since the identification of the original patient with deletion of 5q22-5q23.2 encompassing the APC and DMXL1 genes. The results from the FAP patient with MR and other patients described in the literature indicate that heterozygous deletion of the DMXL1 gene is not lethal in humans. Mutation analysis in additional patients may identify nonsense or truncating mutations.

[0161] Yeast ortholog RAV1. Rav1 is a part of the RAVE complex that comprises Rav1, Rav2 and Skp1. Rav1 is important in forming a functional V-ATPase on vacuolar and early endosome membrane. Vacuolar type H+-ATPase (V-ATPase) is a highly evolutionarily conserved enzyme with remarkably diverse functions in eukaryotic organisms[64]. V-ATPases acidify a wide array of intracellular organelles and pump protons across the plasma membranes of numerous cell types. V-ATPases couple the energy of ATP hydrolysis to proton transport across intracellular and plasma membranes of eukaryotic cells. In vivo regulation of V-ATPase activity is accomplished by reversible dissociation of the Vₗ domain from the Vₒ domain. After initial assembly, the yeast V-ATPases can reversibly disassemble into free Vₒ and Vₗ domains after 2-5 min of glucose deprivation. Reversible disassembly may be a general mechanism of V-ATPase activity regulation, since it exists in yeast.

[0162] Reassembly is proposed to be aided by a complex termed RAVE (regulator of H+-ATPase of vacuolar and endosomal membranes). It has been shown that Rav1p is essential for assembly and activation of the proton-translocating vacuolar ATPase (V-ATPase) both at the yeast lysosome (or vacuole) and at early endosomes [65-67]. The likely Saccharomyces cerevisiae (budding yeast) putative ortholog of DMXL1, Rav1p, has been identified through the isolation of suppressors of a mislocalized mutant form of the trans Golgi network (TGN) membrane protein, Kex2 protease [68-71]. The role of Rav1p in early endosome-to-PVC transport has been demonstrated and some interacting proteins, such as Skp1, have been identified. These studies in yeast provide a compelling model of the function of DMXL proteins.

### V-ATPase and Human Diseases.

[0163] Osteopetrosis. Osteopetrosis is generic name that represents a group of heritable conditions in which there is a defect in osteoclastic bone resorption. Both dominant and recessive osteopetrosis occur in humans [72,73]. Autosomal dominant osteopetrosis shows mild symptoms in adults who experience frequent bone fractures due to brittle bones. A form of osteopetrosis that is clinically more severe is termed autosomal recessive infantile malignant osteopetrosis [74,75]. Three genes have been identified that are responsible for recessive osteopetrosis in humans. Interestingly, they are all directly involved in the proton generation and secretion pathways that are essential for bone resorption. One gene is carbonic anhydrase II (CAII) that when mutated causes osteopetrosis with renal tubular acidosis (type 3) [76]. Mutations to the chloride channel CIC7 gene also lead to both dominant and recessive osteopetrosis [72].

[0164] Distal renal tubular acidosis (dRTA). The importance of V-ATPase activity in renal proton secretion is highlighted by the inherited disease distal renal tubular acidosis. Twelve different mutations to V-ATPase isoform B1 [77] and twenty-four different mutations in a4 lead to dRTA [78, 79].

[0165] Functional analysis of DMXL1 and DMXL2 gene mutations: RAV1 has been shown to be the putative yeast ortholog of the human DMXL1 gene [71]. Rav1p is a subunit of the RAVE complex (Rav1p, Rav2p, Skp1p), which promotes assembly of the V-ATPase holoenzyme. It is required for transport between the early and late endosome/PVC and for localization of trans-Golgi network (TGN) membrane proteins[71]. It is also a potential Cdc28p substrate. The rav1 Δ phenotype is viable, exhibits growth defects on a non-fermentable (respiratory) carbon source, and has been shown to be glycerol, Zn²⁺, and Co²⁺ hypersensitive. It accumulates early endosome-like structures and is known to decrease the rate of trafficking from an early endocytic intermediate to the vacuole. Rav1p has also been shown to function at the early endosome to regulate endocytic trafficking to the vacuole and localization of trans-Golgi network transmembrane proteins. The yeast model system, Saccharomyces cerevesiae will be used to perform functional analyses of DMXL1 and DMXL2 mutations.

[0166] Analysis of rav1Δ phenotypes to study the Rav1p mutations in budding yeast Saccharomyces cerevisiae. Rav1⁻ associated phenotypes have been extensively studied and the complete phenotype listing is available in the Saccharomyces genome database (SGD). Zinc hypersensitivity has been confirmed, as well as the decrease in respiratory growth rate on glycerol associated with rav1Δ [80] using a rav1Δ mutant made in Dr Robert Fuller's lab in W303 background (MATα ade2-1 can1-100 his3-11,15 leu2-3,112 trp1-1 ura3-1).

[0167] In vivo analysis of three non-synonymous changes modeled in budding yeast Saccharomyces cerevisiae to assess the functional effect of DMXL1 human mutations. The effect of three mutations was analyzed—two missense and one in frame deletion in the budding yeast, Saccharomyces cerevesiae. The three Rav1p mutants—Rav1pM998I corresponding to M1664I in DMXL1 (humans); Rav1pR1323C corresponding to R2056C in DMXL1 (humans), and 1014 ΔAAL corresponding to 1680 in DMXL1 (humans) were generated by site-directed mutagenesis using oligonucleotides (Integrated DNA Technologies) encoding the M998I and R1323C amino acid (aa) substitution, and the synthetic in frame deletion of three amino acids AAL at 1014 using a p413ADHSOI3 plasmid template encoding SOI3/RAV1 with a QuikChange Site-directed Mutagenesis Kit (Stratagene). The three amino acid (aa) in frame deletion is from a seven aa conserved region, AALKNAF, between Rav1p, DMXL1 and DMXL2. The in frame deletion was created to understand the effect of deletion of amino acid in the region that is conserved and similar in both humans and yeast. The plasmid template is a single copy centromeric plasmid in which RAV1 is expressed under a moderate ADH promoter. All constructs were sequenced bidirectionally to ensure the presence of each desired mutation and the absence of any additional mutations.

[0168] Rav1p mutations demonstrate glycerol sensitivity in wild type (WT) and rav1Δ cells. WT and mutant transformants selected on a synthetic complete (SC) medium lacking histidine and including 2% glucose (-his/Glu) were streaked onto -his/Glu again (as a control) and -his/Gly. All transformants grew to a similar extent on glucose synthetic medium. On medium containing glycerol, rav1 deletion transformants expressing the missense alleles could partially compensate for wild-type Rav1p while the in frame deletion of AAL abrogates Rav1p's ability to restore growth on glycerol containing media. Quantitative growth curve analysis is pending. Growth of WT transformants was also checked as a control on glycerol medium. As reported by Fuller [81], transformants expressing RAV1 do not grow; over expression of RAV1 is toxic to cells. The R1323C RAV1 allele demonstrated the least sensitivity to glycerol, while the M998I RAV1 allele increased glycerol sensitivity.

[0169] Rav1p mutations demonstrate Zn⁺⁺ hypersensitivity in WT and rav1Δ cells. WT and mutant transformants selected on a synthetic complete (SC) medium lacking histidine and including 2% glucose (-his/Glu) were streaked onto yeast adenine peptone dextrose (YAPD) containing 5 mM ZnCl₂ and without zinc as a control. This medium was buffered with 50 mM Na-MOPS, pH 5.6 and 50 mM Na-MES, pH 5.6 as the rav1Δ mutant used in this study is pH sensitive. Since the rav1Δ strain is Zn⁺⁺ hypersensitive, selection pressure is not required for growth. All transformants grew well on medium lacking zinc. On medium containing zinc, transformants expressing the missense alleles had a moderate effect on growth while the in frame deletion of AAL completely abrogates Rav1p's ability to restore growth on zinc containing media. Quantitative growth curve analysis confirmed the plate data. Growth curve analysis of WT transformants was also done as a control and all grew to the same extent in medium containing zinc. A Rav1 plasmid with HA epitope will be used for site directed mutagenesis in order to perform protein expression studies to check if comparable levels of proteins are made as compared to WT Rav1p.

[0170] Rav1p mutations disrupt endocytosis in WT and rav1Δ cells. The internalization of the lipophilic dye FM4-64 was monitored to determine if there were defects in endosome to vacuole trafficking upon reduction of function of Rav1. FM4-64 incorporates into the plasma membrane and traffics to the vacuole via early and late endosomes [82]. In wild type cells, FM4-64 is transported to the vacuole in a matter of minutes at 30° C., while in cells with endocytic defects, FM4-64 accumulates in punctate spots in the cytoplasm and is unable to transit out of these punctate regions.

[0171] To assess the effects of loss of Rav1p function on endocytosis, WT and rav1Δ cells were grown overnight in YPD to an OD₆₀₀ of 0.9. Ten ml cultures were harvested, and resuspended in 500 ul of cold -his/Glu+40 uM FM4-64 (Molecular Probes). Cells were incubated for 30 min on ice. The cells were subsequently washed to remove the dye and kept shaking at 30° C. for 30 mins. The cells were harvested, washed with 100 ul of 10 mM NaN₃, 1 mM NaF, and resuspended in 2 5 ul of 10 mM NaN3, 10 mM NaF. FM4-64 staining was seen using an Olympus BX60 epifluorescence microscope equipped with a Photometrics Quantix digital camera. Extensive vacuolar staining was observed in WT cells after 30 min at 30° C., while in rav1Δ cells, 50% of cells showed vacuolar ring like structures and 50% of cells showed punctate like structures, suggesting a decreased rate of trafficking from an early endocytic intermediate to the vacuole.

[0172] Wt and rav1Δ transformants were harvested from -his/Glu in a manner similar to that stated above. All the mutant alleles altered the vacuolar staining as compared to WT allele or just empty vector. Extent and severity of defect varies between the different mutants. The effect was more pronounced in WT cells than in rav1Δ cells. The rav1Δ cells show decreased rate of trafficking from an early endocytic intermediate to the vacuole [81] and subsequently some percentage of cells show vacuolar staining and some show punctate like structures. Expression of WT RAV1 almost completely restores vacuolar staining while missense alleles show a mixed population of cells with normal and abnormal endocytosis. The deletion allele shows more percentage of cells with abnormal endocytosis. More quantitative assessment will be needed to document the differences in rav1Δ transformants.

[0173] Yeast two-hybrid screen. DMXL1, DMXL2 and Rav1p are expected to possess several WD-40 repeats that likely mediate interactions with other proteins. Therefore it is critical to identify the proteins with which DMXL1 and DMX12 interact.

[0174] Bait construct. A 2 kb region of DMXL1 has been cloned, showing highest homology to RAV1 in frame with the Gal4 DNA-binding domain of pGBKT7. cDNA was made with the Roche Transcriptor First Strand cDNA Synthesis Kit using random hexamer primer from RNA isolated from human muscle tissue. cDNA was used to PCR amplify the portion of DNA to be cloned using primers with EcoRI and BamH1 restriction sites into pGBKT7 using Phusion High-Fidelity DNA Polymerase. The construct has been checked by restriction enzyme digestion and bidirectional sequencing. The bait did not display any toxicity towards yeast cells, does not auto-activate and is expressed in yeast.

[0175] Bait construct checked for autoactivation. Bait protein was expressed as a fusion with the Gal4 DNA-BD in yeast strain AH109. The high-complexity pretransformed cDNA library, which expresses fusions with the Gal4 AD, is provided in yeast strain Y187. When cultures of the two transformed strains are mixed together overnight, they mate to create diploids. Diploid cells contain four reporter genes: HIS3, ADE2, MEL1, and LacZ, which are activated in response to two-hybrid interactions. To test whether bait autoactivates, the transformation of the bait and pGBKT7-p53 (vector) that serves as a negative control was carried out, using the lithium acetate method, into AH109 cells. AH109 cells expressing vector, bait, ISO4NT were mated with Y187 yeast cells expressing pACT2, SEC3 on YPD. The AH109 and Y187 transformants were selected on -trp and -leu media, respectively. When bait and library (prey) fusion proteins interact, the DNA-BD and AD are brought into proximity to activate transcription of reporter genes such as ADE2, HIS3. The SEC3-ISO4NT interaction serves as a positive control. The YPD plate was replica-plated onto -leu-trp to select for diploids. The diploids were then streaked out on -leu-trp (-L-T) again and on -leu-trp-his-ade to check for autoactivation. The -L-T plate was replica plated onto -leu-trp-his-ade showing the same results. The streaked plates were checked after 5 days and 8 days. Autoactivation is not seen, as no growth is seen on pACT2 X bait construct.

[0176] Bait construct checked for expression in yeast. A Western blot was performed to check if the bait is expressed well in yeast. AH109 cells transformed with pGBKT7-p53 vector that is tagged with myc epitope served as a positive control and bait constructs were grown overnight in 10 ml -trp/Glu.

[0177] Proteins were separated using a pre-cast Bio-Rad 4-20% gradient gel and protein was detected by Western blot using a mouse monoclonal antibody against Myc. The expression of bait construct is weak and the size is as expected; around 100 kDa. The smaller ˜35 kDa product could be a degradation product.

[0178] The DMXL1 and DMXL2 genes will be examined for point mutations, large deletions/duplications, and sequence variations in 200 patients and their parents presenting with PWS-like phenotypes but without 15q11-q13 involvement. Missense mutations in the DMXL1 and DMXL2 genes are dominant mutations and cause a Prader Willi syndrome (PWS) like phenotype. The goal of these studies is to characterize the phenotype caused by mutations in the DMXL1 and DMXL2 genes, which will give information about the genotype:phenotype correlation.

[0179] Fourteen novel missense mutations in the DMXL1 gene on chromosome 5q23.1 in 12.3% (14/114) and two novel missense variants in the DMXL2 gene in 8% (2/25) of patients with a PWS-like phenotype who previously tested negative for known chromosome 15 etiologies have now been identified. Analysis of parental samples previously submitted to the laboratory along with the probands sample from three cases showed these missense mutations (R1826C, M1983V, R2056C) are all de novo whereas the common polymorphisms were found to be inherited.

[0180] EGL has a repository of samples that have been collected over the past few years referred to the laboratory for PWS testing. These samples are available for mutation detection in DMXL1 and DMXL2 genes. Samples are stored as extracted DNA, which has been quantified and checked for quality. The clinical phenotype for each sample is available in the individual databases. A total of 200 samples will be obtained from the EGL repository of patients who have a PWS-like phenotype or closely resemble the phenotype of the patients in whom mutations have been found. The reported clinical features in these patients include: mental retardation, hypotonia, failure to thrive, late-onset obesity, low-set, dysplastic ears, down turned corners of the mouth, and small hands and feet.

[0181] Clinical assessment of patients and refinement of clinical phenotype associated with mutations in the DMXL1 and DMXL2 genes: A clinical assessment form has been developed that will be used to collect the phenotype information for patients in these studies. Each patient will be contacted and brought to the EGL clinic, where the patient will be evaluated clinically. Data collected on the clinical assessment form will be maintained in a database. The clinical phenotype of patients with DMXL1 and/or DMXL2 gene mutations will be defined by obtaining a complete medical and family history of the patient in whom a mutation is identified. The patients will be thoroughly evaluated for the previously reported features (Table 1). Any additional and clinically important features will be recorded and linked to the mutation database. These data will include all the points on the assessment sheet and also additional features as noted by the clinician. A detailed medical and family history will be obtained from these patients in order to characterize the novel syndrome associated with mutations in the DMXL1 and DMXL2 genes.

[0182] Parental samples will be obtained from patients in whom a mutation is found in order to determine whether the mutation is de novo or inherited. An extensive medical evaluation will be carried out of the parent of an offspring in whom a mutation is detected. Fibroblast cell lines from these patients are also expected to be established for future functional studies. All mutation data will be stored in the same database in order to examine the genotype:phenotype correlation. The patients will be followed for a period of five years through the EGL on a yearly basis.

### Mutation Detection.

[0183] PCR analysis. Patient DNA will be PCR amplified for the DMXL1 and DMXL2 genes using PCR primers designed to cover the entire coding region of the gene along with intronic sequence, upstream promoter, and downstream regulatory regions. All DMXL1 gene and DMXL2 gene exons will be amplified under common PCR conditions using the Roche Applied Science GC-Rich Kit for fragment 10 and FastStart Taq DNA Polymerase for all other fragments.

[0184] DNA sequencing analysis. The PCR products will be purified using the Roche PCR Purification Kit. Purified products will be sequenced using the ABI SoLiD High throughput sequencer and base caller according to the manufacturer's instructions.

[0185] Sequence analysis. Patient sequences will be aligned to wild-type sequence for DMXL1 and DMXL2 genes using the NextGENe™ and Mutation Surveyor™ alignment software (Softgenetics, Inc). NextGENe and Mutation Surveyor are sequence alignment software programs used for mutation detection and allow for base calling and they also report zygosity. Data for each patient for each gene will be saved and archived as individual projects. The nucleotide numbering will be reported using the sequence of GenBank® database Accession No. NM_{—}005509 for the DMXL1 gene (SEQ ID NO:1) and the sequence of GenBank® database Accession No. NM_{—}015263 for the DMXL2 gene (SEQ ID NO:3). Amino acid residue numbering is based on the amino acid sequence of DMXL1 (SEQ ID NO:2) and the amino acid sequence of DMXL2 (SEQ ID NO:4). A database of sequence variants and mutations found in the laboratory will be created. All variants will be color-coded for zygosity and their status. (Homozygous—Pink, Heterozygous—Blue; if the variant is a likely mutation, it will be underlined and highlighted yellow in the database). The mutation status will also be entered in the clinical data sheet for each patient.

[0186] Sequence nomenclature and classification: All sequence variants will be reported using standard sequence nomenclature as described by HUGO and the Human Genome Variation Society (HGVS). Sequence variants called by the Mutation Surveyor software will be checked manually by identifying the base position on the cDNA sequence for each gene. Previously reported single nucleotide polymorphisms (SNPs) will be checked in the dbSNP database. Any novel sequence variant, both silent and missense, will be analyzed for its effect on the DMXL1 and DMXL2 transcripts using several different analysis programs, all of which are free and open-access programs.

[0187] SIFT (Sorting intolerant from tolerant) predicts whether an amino acid substitution affects protein function based on sequence homology and the physical properties of amino acids. SIFT can be applied to naturally occurring nonsynonymous polymorphisms and laboratory-induced missense mutations. Given a protein sequence, SIFT will return predictions for what amino acid substitutions will affect protein function. SIFT is a multistep procedure that searches for and chooses similar sequences, makes an alignment of these sequences, and calculates scores based on the amino acids appearing at each position in the alignment.

[0188] POLYPHEN (Polymorphism phenotyping) is a tool that predicts the possible impact of an amino acid substitution on the structure and function of a human protein using straightforward physical and comparative considerations.

[0189] PANTHER (protein analysis through evolutionary relationships) classification system is a unique resource that classifies genes by their functions using published scientific experimental evidence and evolutionary relationships to predict function even in the absence of direct experimental evidence. Proteins are classified by expert biologists into families and subfamilies of shared function, which are then categorized by molecular function and biological process ontology terms. For an increasing number of proteins, detailed biochemical interactions in canonical pathways are captured and can be viewed interactively:

[0190] All the identified mutations will be entered into the DMXL1 and DMXL2 database in the laboratory. The database will link the clinical phenotype for each patient with the laboratory findings. All missense and silent variants will be analyzed further by targeted sequencing of 500 normal controls. If a mutation is identified in a sample from an ethnicity other than Caucasian, a targeted sequencing of 500 normal controls from that ethnicity will be performed. Targeted PCR amplification will be performed for reconfirming each novel variant and the controls sequenced bidirectionally. All novel variants will also be confirmed using an alternative primer set and by sequencing bidirectionally. Sequences will be analyzed using Mutation Surveyor software. Variants that occur at a frequency of ≧1% in the general population will be classified as polymorphisms and reported in the database accordingly.

[0191] Parental samples: Parental samples will be obtained from patients for whom a mutation has been identified. DNA from the parental blood sample will be extracted using a commercially available DNA extraction kit (Puregene, Qiagen INC). Targeted PCR amplification of the previously identified variant in the individual's offspring will be performed. The PCR products will be sequenced bidirectionally and assembled with the individual offspring's mutation surveyor project to identify the variant. If the variant is detected in the parent, it will be classified as a mutation or polymorphism after extensive clinical evaluation and comparison with data from the analysis of control samples. It is possible that some variants will not be classified at this stage and will require extensive functional analysis.

[0192] Genetic analysis may reveal that some of the mutations are inherited from a parent. A detailed analysis will be performed on the parent who carries the mutation for phenotypic features of the condition. If the parent does not show a phenotype it is possible that other modifying factors result in variable expressivity, which can compensate for the phenotypic effect in the parent. Discerning this type of interaction is not within the scope of these studies, although thorough documentation of the parent's entire clinical history may help in revealing such interactions.

[0193] Functional and biochemical analysis of the human mutations will be performed in a yeast model system Saccharomyces cerevesiae. Proteins that interact with DMXL1 and DMXL2 will be identified by yeast two-hybrid analysis.

[0194] Missense mutations in DMXL1 and DMXL2 genes, when introduced in the putative yeast ortholog RAV1, act as dominant mutations and disrupt the function of RAV1p by disrupting its binding with the interacting proteins such as Skp1 and the assembly and activation of the proton-translocating vacuolar ATPase (V-ATPase) both at the yeast lysosome (or vacuole) and at early endosomes.

[0195] Assessment of the effect of human mutations in a yeast model system by site-directed mutagenesis. RAV1 is 4.4 kb in size and 60% homologous to DMXL1 and 46% homologous to DMXL2 cDNA. The central part of DMXL1 and DMXL2 is the region with the highest level of similarity to the yeast Rav1. The yeast Rav1p codes for a putative protein of 1357 amino acids (aa) with a calculated mass of 155 kDa, which is significantly smaller than the DMXL proteins. However, the marked similarity between Rav1 and the central region of DMXL1/DMXL2 suggests that the central portion of DMXL1/DMXL2 and the RAV1 may share a common functional domain. Rav1p was identified through the isolation of suppressors of a mislocalized mutant form of the trans-Golgi network (TGN) membrane protein, Kex2 protease. It has been shown that Rav1p is essential for assembly and activation of the proton-translocating vacuolar ATPase (V-ATPase) both at the yeast lysosome (or vacuole) and at early endosomes.

[0196] In order to understand the interactions and functions of DMXL1 and DMXL2 in animal cells, studies will be conducted to examine the consequences of DMXL1 and DMXL2 mutations, when introduced at conserved sites in Rav1, on the function of the protein in yeast. To date, out of the 16 mutations identified in human patients in DMXL1 and DMXL2, 13 are completely conserved to Rav1. Four mutations out of 13 lie in the putative Rav1 functional domain encompassing amino acids (aa) 900 to 1206. Mutations found in human patients in the region of interest result in the following aa changes: E1623K, M16641, L1745R, and S1774N. They map to E951K, M998I, L1077R, and S1095N respectively, in Rav1p. Site-directed mutagenesis will be performed to obtain these rav1 mutant alleles using rav1 plasmids. They will be cloned into a suitable yeast expression vector. The mutations will be verified by bidirectional sequencing. Rav1 deletion strain will be transformed with the WT and mutant plasmids and empty plasmid to check their effects on phenotypes like glycerol sensitivity and Zn⁺⁺ hypersensitivity and endocytosis. Studies have already successfully shown that the expression of all three mutant alleles of RAV1—M998I, R1323C and ΔAAL in yeast have a dominant effect to varying degrees on the phenotypes tested. Studying the effect of these mutations on different phenotypes will allow for precise mapping of the functional domains of the DMXL1 and DMXL2 proteins. Additional mutations identified from analysis of patient samples will be also studied to understand their functional effect.

[0197] Assessment of the Rav1p mutations on endocytosis. The aberrant effect of Rav1p mutations on endocytic delivery to vacuole has been demonstrated by labeling with FM4-64. Further studies are being carried out in order to understand the effect of Rav1p mutation on endosomes and endocytic delivery. See, e.g., Table 5.

[0198] Assessment of the effect of Rav1p mutations on endosomes. In order to assess the effect of Rav1p mutations on endosomes, electron microscopic analysis will be performed, using thick sections (250 nm) analyzed at tilt angles to permit creation of stereo pairs [81, 97]. Sipos et al. [81] have previously shown that rav1 mutant cells massively accumulated ovoid membrane structures that consisted of clusters of basket-like structures formed from anastomosed tubules. Clusters occurred near the vacuole or facing finger-like invaginations of the plasma membrane, suggestive in appearance of early endosomal tubulo-vesicular structures shown to label with positively charged nanogold structures [98], which might be aberrant early or late endosomes, also were found adjacent to the vacuole, and, in some cases, seemed to be fusing with vacuoles.

[0199] For electron microscopy (EM), cells will be fixed, stained, and visualized [97]. For FM4-64 uptake experiments, strains GSY11-2A (soi3Δ) and GSY11-4D (SOI3) will be grown in YPD to ˜OD₆₀₀=0.9, harvested, and resuspended in cold YPD+40 μM FM4-64 (Molecular Probes). Cells will be then incubated on ice for 1 h, washed in cold YPD, and resuspended in 1 ml of cold YPD and incubated at 14° C., with shaking. After 40 min at 14° C., 500 μl of cells will be harvested and resuspended in 400 μl of prewarmed 30° C. YPD. Cells will be harvested, washed in 1×100 μl of 10 mM NaN₃, 0 mM NaF, resuspended in 25 μl of 10 mM NaN₃, 10 mM NaF, and stored on ice until they were examined using an Axioskop microscope (Carl Zeiss, Thornwood, N.Y.), recording data on film as described previously [99]. Rav1-GFP images will be examined using a Nikon Eclipse 800 microscope and an ORCA2 charge-coupled device (Hamamatsu, Bridgewater, N.J.). Cells will be grown in log phase in minimal medium at 25° C. and mounted in low-temperature agarose. Z-stacks will be created using eight 0.25-μm steps. ISEE Software (Inovision, Raleigh, N.C.) will be used for image capture and deconvolution of Z-stacks.

[0200] Assessment of the effect of rav1 mutant on endocytic delivery of FM4-64 to the vacuole. To assess the effects of loss of rav1p function on bulk-phase endocytosis, rav1 mutant cells will be stained, on ice, with the lipophilic fluorescence dye, FM4-64, warmed to 14° C. and 30° C. for 5 min, and then treated with sodium azide and sodium fluoride to deplete ATP. Previous work by Sipos et al. and these preliminary data suggest that at 14° C., FM4-64 accumulates in peripheral, punctate, endocytic structures in both wild-type and rav1 mutant cells, as has been observed previously for cells maintained at 15° C. [82]. When cells were shifted to 30° C. for 5 min, FM4-64 chased to the vacuolar membrane in wild-type cells but persisted in punctate structures in rav1 mutant cells. Extensive vacuolar membrane staining was observed in the rav1 mutant cells after 30 min at 30° C., although persistent staining of one or two extravacuolar punctate structures was still apparent. Internalization of FM4-64 from the plasma membrane to internal sites will be assessed by warming cells to 30° C., which will help determine the rate of trafficking from an early endocytic intermediate to the vacuole.

[0201] For colocalization of FM4-64 with Rav1-GFP, cells will be grown in log phase at 25° C. in 10 ml of YPD and then placed in a shaking water bath at 14° C. for 30 minutes prior to labeling with FM4-64. Cells will then be harvested, resuspended in 1 ml of YPD+40 mM FM4-64 pre-cooled to 14° C. and incubated at 14° C. for 30 minutes. Cells will be washed by filtration with YPD at 14° C. and placed on pre-cooled slides. A temperature-controlled stage (20/20 Technology, Inc. Wilmington, N.C.) will be used to maintain cells at 14° C. during visualization.

### Yeast Two Hybrid Analysis

[0202] Identification of proteins that interact with DMXL1 proteins using a yeast two-hybrid screen. Rav1p was originally isolated as a Skp1p-interacting protein that is part of a complex that contains Rav2p and the V1 subcomplex of the proton-translocating vacuolar ATPase (V-ATPase) [74,88]. Both RAV1 and RAV2 were shown to be important for glucose-regulated assembly of V1 onto V0 to form functional VATPase on the vacuolar membrane [74]. Analysis of the effects of Rav1p mutations demonstrates that loss of Rav1p function results both in alterations in the localization of trans Golgi network (TGN) membrane proteins as well as selective defects in delivery of endocytic cargo to the vacuole. A synthesis of these results suggests that assembly of vacuolar ATPase at the early endosome in yeast is essential for early endosome maturation and efficient transport from the early endosome to the prevacuolar compartment. RAV1p has been designated as a putative ortholog of DMXL1 based on the high degree of sequence homology in the putative functional domain.

[0203] Identification of proteins that interact with DMXL2 proteins using a yeast two-hybrid screen. A construct will be designed by cloning ˜1 kb of the DMXL2 coding sequence showing the highest homology with the putative yeast ortholog RAV1 to use as bait for the yeast two-hybrid experiments. This construct will be checked for appropriateness via bidirectional sequencing and restriction enzyme digestion. The bait will also be checked for any toxicity towards the yeast cells, auto-activation and expression in yeast in order to get it ready for the library screen.

[0204] Choice of library for yeast two-hybrid screen. DMXL1 and DMXL2 genes have been shown to be highly expressed in whole embryo and several tissues such as brain, cerebellum, skeletal muscle, bone marrow, spleen, pancreas, and heart (SAGE and GENENOTE dataset). Based on this, the matchmaker 11d mEmbryo library has been chosen for the yeast two hybrid experiments. The standard protocol by Clontech will be followed. At least one million diploids will be screened; using fewer would result in less chance of detecting genuine interactions. Phenotype will be confirmed by restreaking, yeast colony PCR, and rescue and isolation of the library plasmid responsible for activation of reporters. The interactions will be confirmed by co-immunoprecipitation and in vitro pull down assays. Similar experiments will be performed for DMXL2. The confirmed interactions will be used to study the effect of DMXL1 and DMXL2 gene mutations and for mapping the functional domains of the DMXL1 and DMXL2 genes.

[0205] Functional and behavioral analyses in a mouse model of both DMXL1 and DMXL2 genes. Based on the human phenotype, which encompasses a cytogenetic deletion involving DMXL1 and DMXL2 genes, heterozygous knockout models of Dmxl1 and Dmxl2 genes in mouse will be expected to have a similar phenotype and display behavioral changes.

[0206] In order to understand the biological function of DMXL1 and DMXL2 proteins, a mouse model for these two genes is employed, using gene-trapped ES cell lines. Mouse models have been previously used to understand gene function and pathways in diseases like hemochromatosis in which only missense mutations have been reported [83].

[0207] Mouse models of both DMXL1 and DMXL2 genes are produced using gene-trapped ES cell lines to study the biological function and behavioral effects. The effects of disrupting each of these two genes are analyzed in heterozygous and homozygous mice. By conducting behavioral assessment, the mouse phenotype can be compared with the human phenotype, to further define the novel syndrome.

[0208] Two ES cell lines have been selected, which are expected to result in altered/truncated protein without any residual activity. These cell lines were selected after carefully evaluating the alternative start sites or alternative splice sites of the DMXL1 and DMXL2 genes. The two cell lines have been provided by Bay Genomics (DMXL1; cell line id CSH215) and the Sanger Center, UK (DMXL2; AN0585). Both the ES cell lines have been verified by PCR amplification and Southern blot by these two providers. Blastocyst injections to generate chimeric mice and subsequent breeding to generate F1 progeny have been performed by the Emory University School of Medicine Transgenic Mouse and Gene Targeting Core Facility.

[0209] Dmxl1 gene. Germ-line transmission for Dmxl1 has been achieved: cell line id CSH215 targeted to exon 9/intron 9 junction of the Dmxl1 gene. Out of the 30 F1 progeny obtained, a total of 10 pups were heterozygous mutants for the Dmxl1 ES cell lines (FIG. 13). Germ-line transmission was confirmed by PCR-based analysis and walking of the targeted region carried out by PCR to identify the precise insertion point of the β-gal-neo-cassette. The β-gal-neo-cassette was found to be inserted 1 kb downstream of the exon9/intron9 junction. Real-time PCR studies of the DMXL1 cDNA confirmed heterozygous knockout of the Dmxl1 gene.

[0210] F2 progeny have been obtained from +/−(heterozygous males)×+/−(heterozygous females) breeding pairs. A total of 93 offspring were obtained. The expected frequency of genotypes if the homozygous mice survived according to Mendelian segregation is 47 heterozygotes, 23 wild type and 23 homozygous offspring. The observed frequency of the genotype is 54 heterozygotes and 39 wild type offspring. No homozygous offspring were obtained. All the offspring were analyzed by targeted PCR analysis to detect heterozygous insertion of the β-gal-neo-cassette. Analysis performed using Chi square test of Mendelian segregation indicates significance at a 1% level that the homozygous mutant animals die before weaning.

[0211] The time of death of the homozygous mutants during embryonic development is also being assessed. This is performed by picking several time points in gestation at which the embryos will be genotyped and morphological assessment of the embryonic and extraembryonic structures will be done. Phenotypic and behavioral analysis of the heterozygous offspring will also be carried out. A causal preliminary observation shows that the heterozygous offspring are sluggish in comparison to the wild type offspring.

[0212] Dmxl2 gene. Eight chimeras from ES cell line AN0585 have been obtained for Dmxl2, and germ-line transmission will be determined in the F1 progeny. The β-gal-neo-cassette is expected to insert 500 by from the exon 12/intron 12 junction.

[0213] Functional and behavioral assessment. Functional and behavioral assessment of mouse models of the DMXL1 and DMXL2 genes will be carried out. Expression analysis will be performed by in situ hybridization of the DMXL1 and DMXL2 genes in the brain during development, as this may indicate when the gene expression is important. If no live-born homozygous mice are obtained, morphological analysis of mouse embryos will be performed to look for morphological defects and associate them with the molecular defect, if possible.

[0214] Expression analysis of the DMXL1 and DMXL2 genes in adult wild-type and mutant mouse tissues. Quantitative real-time PCR analysis will be performed on different adult mouse tissues to reveal the expression patterns of the DMXL1 and DMXL2 genes.

[0215] DMXL1 and DMXL2 genes have been shown to be highly expressed in whole embryo and in several tissues such as brain, cerebellum, skeletal muscle, bone marrow, spleen, pancreas, and heart (SAGE and GENENOTE dataset). In order to understand tissue-specific expression of DMXL1 and DMXL2, real-time PCR analysis will be performed by extracting RNA from the adrenal gland, brain, cerebellum, heart, intestine, skeletal muscle, and spleen. Primers have been designed for two targeted exons in each gene to evaluate gene expression. The mRNA abundance of each transcript will be calculated relative to the expression of the housekeeping gene GAPDH (glyceraldehyde-3-phosphate-dehydrogenase). Data will be analyzed using the ABI analysis program, which analyzes the expression of a target gene relative to a nonregulated reference gene. The mathematical model used is based on the correction for exact PCR efficiencies and the mean crossing point deviation between sample group(s) and control group(s).

[0216] Behavioral assessment. All experiments will be performed in one of the two mouse behavioral testing rooms in the Whitehead Building vivarium. Naïve mice between 3 and 6 months of age are used for all experiments, unless use of younger or older mice is warranted. Both male and female mice are used for all experiments to test for sex differences; if none are observed, results will be combined. Mice will be acclimated to the behavior room for at least one week prior to experiments, and experiments using different paradigms will be separated by at least one week. Very stressful or potentially harmful tests (e.g., aggression, seizure susceptibility) will be performed last. Mice will be maintained on a 12-h light/dark cycle (lights on 0700, lights off 1900), and all tests will be conducted between 0900-1600, unless testing during the dark cycle is a necessary component of the paradigm. The number and types of paradigms examined can always be expanded to follow up on an initial finding or as a way to identify a potential phenotype if the initial tests fail to reveal one. The behavioral data will be analyzed by Student's two-tailed t-test when comparing two groups with equivalent variances, and Mann-Whitney U-test when comparing two groups with unequivalent variances. Multivariate analysis of variance will be used for comparison of three or more groups, and post-hoc comparisons will be performed using the Newman-Keuls test. An alpha level of 0.05 will be used for all statistical tests. The following is a description of the tests that will be performed.

[0217] A battery of tests has been chosen based on the clinical presentation of the patients in whom the novel missense mutations have been found. Mutant mice will be compared with appropriate controls in a battery of tests designed to assess spatial, social, and associative learning and memory, motor behavior, seizure susceptibility, anxiety, depression, and aggression. The number of tests and the order of testing will be tailored to each line of mice based on predictions of gene function. Based on the observed clinical phenotype in mice, additional behavioral assessments will be performed. It is possible that some additional features may be observed in mice that have not yet been seen in humans. The observations in mice will be correlated with the data with the human phenotype.

### Spatial Learning and Memory.

[0218] Morris water maze. The Morris water maze test is the canonical test for spatial memory in rodents and will be performed as described in the literature. The pool will consist of a steel circular water tank having an inner diameter of 115 cm and a height of 59.5 cm. The inner walls are painted white. The water level will be filled to 36.5 cm after being made opaque by the addition of four gallons of whole milk. Water temperature will be 31° C. initially, which typically declines to 26° C. by the end of the third training trial. The platform is white with a diameter of 10 cm, and the water level will be 1 cm above its top. It will be located half way from the center to the wall in the middle of one quadrant. Prominent spatial cues will be mounted on the walls or hung from the ceiling. A video camera attached to the Noldus EthoVision system will be mounted on the ceiling directly above the tank to monitor the activity of the mice and record the probe trials in an automated fashion. Mice will be placed in the pool between quadrants and the location will be varied randomly from trial to trial, except that the same location will never be used consecutively. Mice are allowed to search for the platform for 60 s prior to being removed from the pool. If the mouse climbs onto the platform prior to 60 s, it is allowed to remain on the platform for 10 s before being placed in a heated cage with dry paper towels. If the mouse jumps off the platform, the trial continues. The mice will be given three trials a day separated by about 2 h. The average escape latency on a given day will be calculated for each mouse. Swim speed will be determined by measuring the distance swum during each probe trial. The platform is removed for the probe trials, which last 60 s and do not begin until the mouse starts swimming (some mice occasionally float at the beginning of a trial). Measurements taken during the probe trial do not depend on swim speed.

### Social Memory.

[0219] Social recognition test. Social recognition will be assessed as described in the literature. All mice will be individually housed for at least one week prior to social memory testing. For the two days prior to testing, mice will be habituated to the stimulus animals (ovariectomized C57B16/J females). This is done to reduce the amount of sexual behavior exhibited by the males during testing. In trials 1-4, a stimulus animal (same animal for all four trials) will be placed in the male's home cage for 1 min with 10-min interatrial intervals. On the fifth trial, a novel stimulus animal will be placed in the male's cage for 1 min. Investigation time, which is defined as direct, active olfactory exploration of the stimulus female, will be scored from videotape. Sexual behavior, such as mounting, is not included in investigation time. Using this method, familiarity or social memory can be observed as a reduction in investigation time over the first four trials, with an increase back to baseline during the fifth trial when a novel animal is introduced.

[0220] Social discrimination test. The social discrimination test will be performed as described in the literature. In the first trial, a stimulus animal (ovariectomized female) will be placed into the male's home cage for 5 min and investigation time will be measured. Thirty minutes later, the male will be simultaneously exposed to the same stimulus animal from the first trial and a novel stimulus animal for 5 min. Social memory is assessed by comparing the amount of time the male spends investigating the familiar animal to the amount of time he spends investigating the unfamiliar stimulus animal. If the males recognize the previously presented female, they will spend more time investigating the novel female than the familiar female during trial 2. To demonstrate that any defects in this test are specifically “social” in nature, an object recognition test will also be performed. This test will be performed identically to the social recognition test, except that two novel objects (identical plastic balls) will be placed into the arena for 5 min instead of a female mouse, mice will be videotaped, and investigation time will be recorded. Thirty minutes later the animals will be put back into the same box where one familiar (one of the balls from trial 1) and one novel object (similar size ball, different in shape and color) will be placed. The behavior of mice will be videotaped, and time spent investigating each object will be recorded. If the animals recognize the previously presented ball, they will spend more time investigating the new ball than the familiar ball during trial 2.

### Associative Learning.

[0221] Place conditioning. Associative learning will be assessed by place conditioning as described in the literature. Mice are placed in the “neutral” middle compartment of a 3-compartment conditioned place preference chamber (San Diego Instruments, La Jolla, Calif.) and allowed to freely explore the other two compartments that are distinguishable by floor texture and wall pattern for 20 min, and time spent in each compartment is recorded (“pretest”). One to six days later, mice are subjected to “conditioning” sessions for three consecutive days. Mice are restricted to one compartment for 30 min in the morning, and restricted to the other compartment for 30 min in the afternoon (˜4 h after the morning conditioning session). One chamber is typically “neutral” (e.g., no associative stimulus), while the other chamber is typically paired with either a “rewarding” (e.g., food, cocaine injection) or “aversive” (e.g., lithium chloride injection) stimulus. Mice will be designated to receive the associative stimulus on either the “A” side or the “B” side using an unbiased design (i.e., for each treatment group, equal numbers of mice receive the associative stimulus on each side, and equal numbers of mice receive the associative stimulus on the “preferred” side and “non-preferred” side based on pretest results). The day following the last conditioning session, mice are placed in the neutral middle compartment in the absence of associative stimulus, allowed to freely explore all compartments for 20 min, and the time spent in each compartment is recorded. If the mouse associates the paired stimulus with positive feelings (reward), it will spend more time on the stimulus-paired side, while if the paired stimulus is aversive, the mouse will spend more time on the “neutral” (unpaired) side. The “preference” score is calculated by subtracting the amount of time spent on the neutral side from the amount of time spent on the stimulus-paired side.

### Depression.

[0222] Forced swim test. Depression will be assessed using a modified version of the Porsolt forced swim test. Mice will be forced to swim for 6 min in 20 cm of fresh 30° C. water in a 4-L beaker (18 cm diameter). In this test, struggling, swimming, and immobile floating behavior is typically observed, with immobility considered a “depression-like” phenotype. A mouse will be considered immobile when it is only making movements necessary to remain floating, and immobility will be quantified during the last 4 min of the test. The mice will then be removed from the water, dried, and returned to their home cage.

### Anxiety.

[0223] Open field test. The open field test will be performed as described in the literature. The open field apparatus is a circular arena (96.5 cm diameter) with opaque gray Plexiglas walls (28 cm high). A permanent marker is used to describe a smaller circle 18 cm from the walls that divide the chamber into a smaller inner circle (area=˜3100 cm²) and an outer ring (area=˜3800 cm²). Within the inner circle are 4 small PVC cylinders (3.5 cm high, 3.5 cm diameter opening) in a random arrangement that are used to measure investigatory behavior of the mice. Mice will be placed individually in the center of the inner circle and allowed to roam freely about the apparatus for 5 min. Measures will include (1) time spent in inner circle, (2) time spent in outer ring, (3) total number of crossings between the divisions, and (4) number of head-pokes into the cylinders. Mice that spend most of their time in the outer circle and against the walls are considered anxious, while mice that spend most of their time in the inner circle and exploring the cylinders are considered non-anxious.

[0224] Elevated plus maze. The elevated plus maze will be performed as described in the literature. The elevated plus maze consists of two open arms (25 cm×5 cm) and two closed arms (25 cm×5 cm×5 cm) that extend from a central platform (5 cm×5 cm) and are elevated 40 cm from the floor. The apparatus is constructed of clear acrylic over which black duct tape is applied to the walls and floor, which prevents slippage on the open arms. Mice will be placed individually in the center square facing an open arm and allowed to explore the maze for 5 min. An arm entry is counted only when all four paws are inside the arm. Measures scored include (1) time spent in open arms, (2) time spent in closed arms, (3) number of open arm entries, (4) number of closed arm entries, and (5) number of rears in closed arms. Percent of time spent in open arms and total number of entries (to assess locomotor activity) are calculated from the raw data. Time spent in the closed arms is considered an anxiety response.

### Aggression.

[0225] Resident-intruder aggression. Aggression will be assessed using a resident-intruder paradigm. Males will be housed individually for one week before aggression is assessed. Aggression will be assessed over three sessions, spaced 2-3 days apart. Resident males will be exposed to different intruder males in each session. An intruder male will be placed in the subject male's home cage for 5 min. Measures will include (1) attack latency, (2) attack duration (total), and (3) number of aggressive bouts. In addition, defensive behaviors, such as flight and defensive supine postures, will be scored if observed. Although only male mice typically display aggression in this type of test, both males and females will be tested (10 of each genotype and treatment group), because normal levels of aggression may be enhanced by genetic manipulation. Female intruder mice will be used instead of males for tests with resident females to eliminate the confounding effects of sexual behaviors.

### Seizure Susceptibility.

[0226] Generalized seizures. Susceptibility to generalized, clonic-tonic seizures will be assessed using the convulsant agents, flurothyl and pentylenetetrazole (PTZ), as described in the literature. For flurothyl, mice will be placed in an airtight Plexiglas chamber, and the volatile convulsant 2,2,2-trifluroethylether (flurothyl) will be infused onto filter paper at a rate of 20 μl/min, from which it will vaporize. For PTZ, mice will be injected i.p. with PTZ (30, 40, or 50 mg/kg), placed in a clear container, and closely observed for 10 min. Latency to first myoclonic jerk and clonic-tonic seizure will be used as measurements of seizure susceptibility. Number of mice progressing to tonic extension and death will be used as measurements of maximal seizure severity.

### Locomotor Activity.

[0227] Novel environment. Mice will be tested for hyperactivity or inactivity in response to a novel environment as described (Weinshenker et al., 2002). Ambulations (consecutive beam breaks) will be measured in transparent Plexiglas cages (40×20×20 cm) placed into a rack with seven infrared photobeams spaced 5 cm apart, each end beam 5 cm from the cage wall (San Diego Instruments Inc., La Jolla, Calif.). Mice will be placed in the activity chambers for 2 h, and ambulations will be recorded in 30-min bins.

[0228] Circadian activity: Mice will be tested for hyperactivity or inactivity over a full circadian cycle by placing them in the activity chambers described above, which are equipped with a food hopper and water bottle. After a 24-h “habituation” phase for the mice to acclimate to their environment, ambulations will be recorded in 30-min bins for one full light cycle and one full dark cycle (24 h).

### Coordinated Movement.

[0229] Rotarod. Rotarod tests will be performed as described in the literature. Mice will be placed on the rotarod while stationary. Three consecutive trials will be given each day, except for the first. On the first day the orientation of the mice will be alternated, so that they have to walk backward on the first, third, and fifth trials, and forward on the second, fourth, and sixth trials. On all other days the mice are required to move forward only. Each trial lasts up to 2 min. The average time a mouse remains on the rotarod is calculated for each day. After five days of training at the lowest speed (3.4 rpm), mice will be subjected to an accelerating rotarod. The procedure will be the same, except that the rotarod accelerates over a period of 5 min from 3.4 rpm to 26 rpm (equivalent to a running speed of 8.2 cm/s). Each trial is continued until all mice have fallen off the rod. An average for each mouse over all 12 trials in addition to a daily average will be calculated.

[0230] Pole test. The performance of mice in the pole test will be assessed as described in the literature. Mice are placed on top of a wooden pole, which is 50 cm high and 1 cm wide. The base of the pole is placed in the animal's home cage. Time to orient downward and descend the pole is recorded. Mice will receive two days of training (five trials each session). On test day animals will be recorded over five trials and the best of the five performances will be recorded.

[0231] Challenging beam traversal. The performance of mice in the challenging beam traversal will be assessed as described in the literature. Mice are trained to walk across a progressively narrowing beam covered with a metal grid. Mice are given two days of training (assisted trials) prior to testing without the mesh grid in which the home cage is positioned closely to the beam as encouragement along the beam until they are able to traverse the entire length of the beam unassisted. Animals will be videotaped throughout five trials and then viewed in slow motion. The total number of steps and time to traverse the beam will be used to rate severity of movement deficit. Errors will include when a limb slips through the grid during a forward movement. An animal can make a maximum of four errors per step. Errors per step, time to traverse, and number of steps will be calculated and averaged across the five trials for each animal.

[0232] Gait analysis. Gait activity will be monitored by an automated system (MouseSpecifics, CuraVita). Mice are trained to walk on a clear treadmill over a high-speed camera, and 17 different parameters of gait dynamics (e.g., stride length, brake time, paw angle, stance width, etc) are recorded. Mice will be habituated to the chamber for 5 min/day for five days prior to testing.

### Example II

### Behavioral Experiments on Dmxl1Knock Out Mouse Model

[0233] Sixteen wild type (WT) and Dmxl1 heterozygous knock out mice of each sex between 3 and 6 months of age were used for behavioral analysis.

[0234] The heterozygous Dmxl1 knockout mouse is impaired in social recognition. The WT and Dmxl1 heterozygous knock out mice were subjected to the same stimulus for the first four consecutive trials. With subsequent trials a decrease in social investigation time is expected if memory exists which is seen in the WT mice. The Dmxl1 heterozygous knock out mice do not demonstrate a decrease in social investigation time. In the last trial, mice were exposed to a novel stimulus and an increase in investigation time back to baseline is expected, which was seen in WT mice.

[0235] The heterozygous Dmxl1 knockout mouse does show any difference in circadian cycle in comparison to the WT mouse. The activity of WT and Dmxl1 heterozygous knock out mice was tested over a full circadian cycle. The mice were monitored over a 12 hour dark cycle followed by a 12 hour light cycle. Mice being nocturnal are expected to be more active during dark cycle compared to light cycle. No difference was seen in the activities between WT and Dmxl1 heterozygous knock out mice.

### Example III

### Further Defining the Phenotype Associated with Mutations in the DMXL1 Gene

[0236] Extensive clinical evaluation was performed on two DMXL1 patients and their parents. An IRB consent and extensive clinical history was documented on the clinical evaluation form developed specifically for this project. Patient 1 is a 3 year old male carrying a p.Q1926R de novo mutation and Patient 2 is a 6 year old female carrying a p.G2733D de novo mutation.

[0237] Patient 1 had hypotonia as an infant, feeding difficulties that did not require a feeding tube, right strabismus, and left cryptorchidism. He had acquired microcephaly (OFC at birth 10^{th} centile; current OFC <<5^{th} centile), normal head MRI, no seizures, and development of lower extremity spasticity. He walked at 18-20 months and is currently nonverbal. He has balance/coordination issues and hyperactivity. He was found to have a Q1926R mutation in DMXL1.

[0238] Patient 2 is a 6-9/12 year old female with infantile hypotonia, failure to thrive that necessitated a gastrostomy tube, strabismus, and hypoplastic labia majora. She also has acquired microcephaly (OFC at birth 25^{th}-50^{th} centile; current OFC 2^{rd} centile), normal head MRI, no seizures, and development of lower extremity spasticity. She does not have hyperphagia but weight is at 90^{th} centile. She walked at 3 years and was able to say up to 40 words at 3 years; however, she has since lost all ability to speak. Testing for Rett syndrome and PWS/Angelman syndrome was negative, but DMXL1 nucleic acid sequencing identified a G2733D mutation. She also has balance/coordination issues and hyperactivity.

[0239] Both patients have previously received extensive clinical workup including Cytogenetic 44K Oligoarray, Prader Willi and Angelman syndrome analysis, and MeCP2 gene sequencing. They both share some common physical characteristics like hypertelorism, long triangular shape of the face, and arched eyebrows. They also share some clinical features like infantile hypotonia, strabismus, childhood spasticity, microcephaly, hyperactivity and some shared features with PWS (Table 4).

[0240] The foregoing is illustrative of the present invention, and is not to be construed as limiting thereof. The invention is defined by the following claims, with equivalents of the claims to be included therein.

[0241] All publications, patent applications, patents, patent publications, all sequences identified by GenBank® database and/or SNP accession numbers, and other references cited herein are incorporated by reference in their entireties for the sequences and/or teachings relevant to the sentence and/or paragraph and/or claim in which the reference is presented.

### REFERENCES

[0242] 1 Schluth, C., Cossee, M., Girard-Lemaire, F., Carelle, N., Dollfus, H., Jeandidier, E. and Flori, E. (2007) Phenotype in X chromosome rearrangements: pitfalls of X inactivation study. Pathol Biol (Paris). 55, 29-36
[0243] 2 Martin, C. L. and Ledbetter, D. H. (2007) Autism and cytogenetic abnormalities: solving autism one chromosome at a time. Curr Psychiatry Rep. 9, 141-147
[0244] 3 Raymond, F. L. (2006) X linked mental retardation: a clinical guide. J Med Genet. 43, 193-200
[0245] 4 Raymond, F. L. and Tarpey, P. (2006) The genetics of mental retardation. Hum Mol Genet. 15 Spec No 2, R110-116
[0246] 5 Ropers, H. H. (2006) X-linked mental retardation: many genes for a complex disorder. Curr Opin Genet Dev. 16, 260-269
[0247] 6 Ropers, H. H. and Hamel, B. C. (2005) X-linked mental retardation. Nat Rev Genet. 6, 46-57
[0248] 7 Engels, H., Brockschmidt, A., Hoischen, A., Landwehr, C., Bosse, K., Walldorf, C., Toedt, G., Radlwimmer, B., Propping, P., Lichter, P. and Weber, R. G. (2007) DNA microarray analysis identifies candidate regions and genes in unexplained mental retardation. Neurology. 68, 743-750
[0249] 8 Stevenson, R. E. (2005) Advances in X-linked mental retardation. Curr Opin Pediatr. 17, 720-724
[0250] 9 Dutta, S., Nandagopal, K., Gangopadhyay, P. K. and Mukhopadhyay, K. (2005) Molecular aspects of Down syndrome. Indian Pediatr. 42, 339-344
[0251] 10 Obe, G. and Ristow, H. (1979) Mutagenic, cancerogenic and teratogenic effects of alcohol. Mutat Res. 65, 229-259
[0252] 11 Tassone, F., Hagerman, R. J., Loesch, D. Z., Lachiewicz, A., Taylor, A. K. and Hagerman, P. J. (2000) Fragile X males with unmethylated, full mutation trinucleotide repeat expansions have elevated levels of FMR1 messenger RNA. Am J Med Genet. 94, 232-236
[0253] 12 Fischer, K. M. (1996) Genes for Prader Willi syndrome/Angelman syndrome and fragile X syndrome are homologous, with genetic imprinting and unstable trinucleotide repeats causing mental retardation, autism and aggression. Med Hypotheses. 47, 289-298
[0254] 13 Lalande, M. and Calciano, M. A. (2007) Molecular epigenetics of Angelman syndrome. Cell Mol Life Sci. 64, 947-960
[0255] 14 Schmid, A., Moser, H., Walti, U., Herschkowitz, N., Colombo, J. P., Wiesmann, U. and Rossi, E. (1974) [Mental retardation in childhood. Clinical, biochemical and epidemiological studies on 286 institutionalized children]. Schweiz Med Wochenschr. 104, 915-923
[0256] 15 Rife, M., Mallolas, J., Castellvi-Bel, S., Badenas, C., Jimenez, D. and Mila, M. (2000) Molecular study of the PAK3 and GDI1 genes in nonsyndromic X-linked mental retardation Spanish patients. Am J Med Genet. 94, 389-391
[0257] 16 Villard, L., Lossi, A. M., Cardoso, C., Proud, V., Chiaroni, P., Colleaux, L., Schwartz, C. and Fontes, M. (1997) Determination of the genomic structure of the XNP/ATRX gene encoding a potential zinc finger helicase. Genomics. 43, 149-155
[0258] 17 Malinowski, M. J. and Blatt, R. J. (1997) Commercialization of genetic testing services: the FDA, market forces, and biological tarot cards. Tulane Law Rev. 71, 1211-1312
[0259] 18 Raymond, F. L. (2003) Genetic services for people with intellectual disability and their families. J Intellect Disabil Res. 47, 509-514
[0260] 19 Camprubi-Sanchez, C., Gabau-Vila, E., Artigas-Pallares, J., Coll-Sandiumenge, M. D. and Guitart-Feliubadalo, M. (2006) [From the clinical to the genetic diagnosis of Prader-Willi and Angelman syndromes.]. Rev Neurol. 42 Suppl 1, S61-67
[0261] 20 Gunay-Aygun, M., Cassidy, S. B. and Nicholls, R. D. (1997) Prader-Willi and other syndromes associated with obesity and mental retardation. Behav Genet. 27, 307-324
[0262] 21 Gunay-Aygun, M., Schwartz, S., Heeger, S., O'Riordan, M. A. and Cassidy, S. B. (2001) The changing purpose of Prader-Willi syndrome clinical diagnostic criteria and proposed revised criteria. Pediatrics. 108, E92
[0263] 22 Driscoll, D. J., Waters, M. F., Williams, C. A., Zori, R. T., Glenn, C. C., Avidano, K. M. and Nicholls, R. D. (1992) A DNA methylation imprint, determined by the sex of the parent, distinguishes the Angelman and Prader-Willi syndromes. Genomics. 13, 917-924
[0264] 23 Nicholls, R. D., Knoll, J. H., Butler, M. G., Karam, S. and Lalande, M. (1989) Genetic imprinting suggested by maternal heterodisomy in nondeletion Prader-Willi syndrome. Nature. 342, 281-285
[0265] 24 Varela, M. C., Simoes-Sato, A. Y., Kim, C. A., Bertola, D. R., De Castro, C. I. and Koiffmann, C. P. (2006) A new case of interstitial 6q16.2 deletion in a patient with Prader-Willi-like phenotype and investigation of SIM1 gene deletion in 87 patients with syndromic obesity. Eur J Med Genet. 49, 298-305
[0266] 25 Faivre, L., Cormier-Daire, V., Lapierre, J. M., Colleaux, L., Jacquemont, S., Genevieve, D., Saunier, P., Munnich, A., Turleau, C., Romana, S., Prieur, M., De Blois, M. C. and Vekemans, M. (2002) Deletion of the SIM1 gene (6q16.2) in a patient with a Prader-Willi-like phenotype. J Med Genet. 39, 594-596
[0267] 26 Smith, T. F., Gaitatzes, C., Saxena, K. and Neer, E. J. (1999) The WD repeat: a common architecture for diverse functions. Trends Biochem Sci. 24, 181-185
[0268] 27 Garcia-Higuera, I., Gaitatzes, C., Smith, T. F. and Neer, E. J. (1998) Folding a WD repeat propeller. Role of highly conserved aspartic acid residues in the G protein beta subunit and Sec13. J Biol Chem. 273, 9041-9049
[0269] 28 Gettemans, J., Meerschaert, K., Vandekerckhove, J. and De Corte, V. (2003) A kelch beta propeller featuring as a G beta structural mimic: reinventing the wheel? Sci STKE. 2003, PE27
[0270] 29 Guerrini, R. and Carrozzo, R. (2002) Epileptogenic brain malformations: clinical presentation, malformative patterns and indications for genetic testing. Seizure. 11 Suppl A, 532-543; quiz 544-537
[0271] 30 Morris, S. M., Albrecht, U., Reiner, O., Eichele, G. and Yu-Lee, L. Y. (1998) The lissencephaly gene product Lisl, a protein involved in neuronal migration, interacts with a nuclear movement protein, NudC. Curr Biol. 8, 603-606
[0272] 31 Ridley, A. J., Colley, J., Wynford-Thomas, D. and Jones, C. J. (2005) Characterisation of novel mutations in Cockayne syndrome type A and xeroderma pigmentosum group C subjects. J Hum Genet. 50, 151-154
[0273] 32 Zhou, H. X. and Wang, G. (2001) Predicted structures of two proteins involved in human diseases. Cell Biochem Biophys. 35, 35-47
[0274] 33 Handschug, K., Sperling, S., Yoon, S. J., Hennig, S., Clark, A. J. and Huebner, A. (2001) Triple A syndrome is caused by mutations in AAAS, a new WD-repeat protein gene. Human Molecular Genetics. 10, 283-290
[0275] 34 Bassi, M. T., Ramesar, R. S., Caciotti, B., Winship, I. M., De Grandi, A., Riboni, M., Townes, P. L., Beighton, P., Ballabio, A. and Borsani, G. (1999) X-linked late-onset sensorineural deafness caused by a deletion involving OA1 and a novel gene containing WD-40 repeats. American Journal of Human Genetics. 64, 1604-1616
[0276] 35 Gratenstein, K., Heggestad, A. D., Fortun, J., Notterpek, L., Pestov, D. G. and Fletcher, B. S. (2005) The WD-repeat protein GRWD1: potential roles in myeloid differentiation and ribosome biogenesis. Genomics. 85, 762-773
[0277] 36 Komachi, K., Redd, M. J. and Johnson, A. D. (1994) The WD repeats of Tup1 interact with the homeo domain protein alpha 2. Genes Dev. 8, 2857-2867
[0278] 37 Yoon, Y. M., Baek, K. H., Jeong, S. J., Shin, H. J., Ha, G. H., Jeon, A. H., Hwang, S. G., Chun, J. S. and Lee, C. W. (2004) WD repeat-containing mitotic checkpoint proteins act as transcriptional repressors during interphase. FEBS Lett. 575, 23-29
[0279] 38 Li, D. and Roberts, R. (2001) WD-repeat proteins: structure characteristics, biological function, and their involvement in human diseases. Cell Mol Life Sci. 58, 2085-2097
[0280] 39 Chernova, O. B., Hunyadi, A., Malaj, E., Pan, H., Crooks, C., Roe, B. and Cowell, J. K. (2001) A novel member of the WD-repeat gene family, WDR11, maps to the 10q26 region and is disrupted by a chromosome translocation in human glioblastoma cells. Oncogene. 20, 5378-5392
[0281] 40 Fritzius, T., Frey, A. D., Schweneker, M., Mayer, D. and Moelling, K. (2007) WD-repeat-propeller-FYVE protein, ProF, binds VAMP2 and protein kinase Czeta. FEBS J. 274, 1552-1566
[0282] 41 Gunawardane, R. N., Martin, O. C. and Zheng, Y. (2003) Characterization of a new gammaTuRC subunit with WD repeats. Molecular Biology of the Cell. 14, 1017-1026
[0283] 42 Zaphiropoulos, P. G. and Toftgard, R. (1996) cDNA cloning of a novel WD repeat protein mapping to the 9q22.3 chromosomal region. DNA Cell Biol. 15, 1049-1056
[0284] 43 Kapranov, P., Willingham, A. T. and Gingeras, T. R. (2007) Genome-wide transcription and the implications for genomic organization. Nat Rev Genet. 8, 413-423
[0285] 44 Willingham, A. T., Dike, S., Cheng, J., Manak, J. R., Bell, I., Cheung, E., Drenkow, J., Dumais, E., Duttagupta, R., Ganesh, M., Ghosh, S., Helt, G., Nix, D., Piccolboni, A., Sementchenko, V., Tammana, H., Kapranov, P. and Gingeras, T. R. (2006) Transcriptional landscape of the human and fly genomes: nonlinear and multifunctional modular model of transcriptomes. Cold Spring Harb Symp Quant Biol. 71, 101-110
[0286] 45 Cottrell, S., Bicknell, D., Kaklamanis, L. and Bodmer, W. F. (1992) Molecular analysis of APC mutations in familial adenomatous polyposis and sporadic colon carcinomas. Lancet. 340, 626-630
[0287] 46 Kinzler, K. W., Nilbert, M. C., Su, L. K., Vogelstein, B., Bryan, T. M., Levy, D. B., Smith, K. J., Preisinger, A. C., Hedge, P., McKechnie, D. and et al. (1991) Identification of FAP locus genes from chromosome 5q21. Science. 253, 661-665
[0288] 47 Miki, Y., Nishisho, I., Miyoshi, Y., Horii, A., Ando, H., Nakajima, T., Utsunomiya, J. and Nakamura, Y. (1991) Frequent loss of heterozygosity at the MCC locus on chromosome 5q21-22 in sporadic colorectal carcinomas. Jpn J Cancer Res. 82, 1003-1007
[0289] 48 Kraemer, C., Enklaar, T., Zabel, B. and Schmidt, E. R. (2000) Mapping and structure of DMXL1, a human homologue of the DmX gene from Drosophila melanogaster coding for a WD repeat protein. Genomics. 64, 97-101
[0290] 49 Bennett, R. L., Karayiorgou, M., Sobin, C. A., Norwood, T. H. and Kay, M. A. (1997) Identification of an interstitial deletion in an adult female with schizophrenia, mental retardation, and dysmorphic features: further support for a putative schizophrenia-susceptibility locus at 5q21-23.1. Am J Hum Genet. 61, 1450-1454
[0291] 50 Raedle, J., Friedl, W., Engels, H., Koenig, R., Trojan, J. and Zeuzem, S. (2001) A de novo deletion of chromosome 5q causing familial adenomatous polyposis, dysmorphic features, and mild mental retardation. Am J Gastroenterol. 96, 3016-3020
[0292] 51 Garcia-Minaur, S., Ramsay, J., Grace, E., Minns, R. A., Myles, L. M. and FitzPatrick, D. R. (2005) Interstitial deletion of the long arm of chromosome 5 in a boy with multiple congenital anomalies and mental retardation: Molecular characterization of the deleted region to 5q22.3q23.3. Am J Med Genet A. 132, 402-410
[0293] 52 Finch, R., Moore, H. G., Lindor, N., Jalal, S. M., Markowitz, A., Suresh, J., Offit, K. and Guillem, J. G. (2005) Familial adenomatous polyposis and mental retardation caused by a de novo chromosomal deletion at 5q15-q22: report of a case. Dis Colon Rectum. 48, 2148-2152
[0294] 53 van den Boom, J., Wolter, M., Blaschke, B., Knobbe, C. B. and Reifenberger, G. (2006) Identification of novel genes associated with astrocytoma progression using suppression subtractive hybridization and real-time reverse transcription-polymerase chain reaction. Int J Cancer. 119, 2330-2338
[0295] 54 Nagano, F., Kawabe, H., Nakanishi, H., Shinohara, M., Deguchi-Tawarada, M., Takeuchi, M., Sasaki, T. and Takai, Y. (2002) Rabconnectin-3, a novel protein that binds both GDP/GTP exchange protein and GTPase-activating protein for Rab3 small G protein family. J Biol Chem. 277, 9629-9632
[0296] 55 Sakisaka, T. and Takai, Y. (2005) Purification and properties of rabconnectin-3. Methods Enzymol. 403, 401-407
[0297] 56 Kawabe, H., Sakisaka, T., Yasumi, M., Shingai, T., Izumi, G., Nagano, F., Deguchi-Tawarada, M., Takeuchi, M., Nakanishi, H. and Takai, Y. (2003) A novel rabconnectin-3-binding protein that directly binds a GDP/GTP exchange protein for Rab3A small G protein implicated in Ca(2+)-dependent exocytosis of neurotransmitter. Genes Cells. 8, 537-546
[0298] 57 Castro, L. F., Santos, M. M. and Reis-Henriques, M. A. (2005) The genomic environment around the Aromatase gene: evolutionary insights. BMC Evol Biol. 5, 43
[0299] 58 Liehr, T., Starke, H., Heller, A., Weise, A., Beensen, V., Senger, G., Kittner, G., Prechtel, M., Claussen, U. and Seidel, J. (2003) Evidence for a new microdeletion syndrome in 15q21. Int J Mol Med. 11, 575-577
[0300] 59 Muralidhar, B., Marney, A. and Butler, M. G. (1999) Analysis of imprinted genes in subjects with Prader-Willi syndrome and chromosome 15 abnormalities. Genet Med. 1, 141-145
[0301] 60 Park, W. S., Park, J. Y., Oh, R. R., Yoo, N.J., Lee, S. H., Shin, M. S., Lee, H. K., Han, S., Yoon, S. K., Kim, S. Y., Choi, C., Kim, P. J., Oh, S. T. and Lee, J. Y. (2000) A distinct tumor suppressor gene locus on chromosome 15q21.1 in sporadic form of colorectal cancer. Cancer Res. 60, 70-73
[0302] 61 Martin, F., Platt, J., Tawn, E. J. and Burn, J. (1990) A de novo interstitial deletion of 15(q21.2q22.1) in a moderately retarded adult male. J Med Genet. 27, 637-639
[0303] 62 Lalani, S. R., Sahoo, T., Sanders, M. E., Peters, S. U. and Bejjani, B. A. (2006) Coarctation of the aorta and mild to moderate developmental delay in a child with a de novo deletion of chromosome 15(q21.1q22.2). BMC Med Genet. 7, 8
[0304] 63 Faivre, L., Dollfus, H., Lyonnet, S., Alembik, Y., Megarbane, A., Samples, J., Gorlin, R. J., Alswaid, A., Feingold, J., Le Merrer, M., Munnich, A. and Cormier-Daire, V. (2003) Clinical homogeneity and genetic heterogeneity in Weill-Marchesani syndrome. Am J Med Genet A. 123, 204-207
[0305] 64 Zhang, Z., Charsky, C., Kane, P. M. and Wilkens, S. (2003) Yeast V1-ATPase: affinity purification and structural features by electron microscopy. J Biol Chem. 278, 47299-47306
[0306] 65 Kane, P. M. (2005) Close-up and genomic views of the yeast vacuolar H+-ATPase. J Bioenerg Biomembr. 37, 399-403
[0307] 66 Kane, P. M. (2006) The where, when, and how of organelle acidification by the yeast vacuolar H+-ATPase. Microbiol Mol Biol Rev. 70, 177-191
[0308] 67 Sambade, M. and Kane, P. M. (2004) The yeast vacuolar proton-translocating ATPase contains a subunit homologous to the Manduca sexta and bovine e subunits that is essential for function. J Biol Chem. 279, 17361-17365
[0309] 68 Brace, E. J., Parkinson, L. P. and Fuller, R. S. (2006) Skp1p regulates Soi3p/Rav1p association with endosomal membranes but is not required for vacuolar ATPase assembly. Eukaryot Cell. 5, 2104-2113
[0310] 69 Zhang, J. W., Parra, K. J., Liu, J. and Kane, P. M. (1998) Characterization of a temperature-sensitive yeast vacuolar ATPase mutant with defects in actin distribution and bud morphology. J Biol Chem. 273, 18470-18480
[0311] 70 Smardon, A. M., Tarsio, M. and Kane, P. M. (2002) The RAVE complex is essential for stable assembly of the yeast V-ATPase. J Biol Chem. 277, 13831-13839
[0312] 71 Seol, J. H., Shevchenko, A., Shevchenko, A. and Deshaies, R. J. (2001) Skp1 forms multiple protein complexes, including RAVE, a regulator of V-ATPase assembly. Nat Cell Biol. 3, 384-391
[0313] 72 Michigami, T., Kageyama, T., Satomura, K., Shima, M., Yamaoka, K., Nakayama, M. and Ozono, K. (2002) Novel mutations in the a3 subunit of vacuolar H(+)-adenosine triphosphatase in a Japanese patient with infantile malignant osteopetrosis. Bone. 30, 436-439
[0314] 73 Frattini, A., Orchard, P. J., Sobacchi, C., Giliani, S., Abinun, M., Mattsson, J. P., Keeling, D. J., Andersson, A. K., Wallbrandt, P., Zecca, L., Notarangelo, L. D., Vezzoni, P. and Villa, A. (2000) Defects in TCIRG1 subunit of the vacuolar proton pump are responsible for a subset of human autosomal recessive osteopetrosis. Nature Genetics. 25, 343-346
[0315] 74 Fasth, A. and Porras, O. (1999) Human malignant osteopetrosis: pathophysiology, management and the role of bone marrow transplantation. Pediatric Transplantation. 3 Suppl 1, 102-107
[0316] 75 Sobacchi, C., Frattini, A., Orchard, P., Porras, O., Tezcan, I., Andolina, M., Babul-Hirji, R., Baric, I., Canham, N., Chitayat, D., Dupuis-Girod, S., Ellis, I., Etzioni, A., Fasth, A., Fisher, A., Gerritsen, B., Gulino, V., Horwitz, E., Klamroth, V., Lanino, E., Mirolo, M., Musio, A., Matthijs, G., Nonomaya, S., Notarangelo, L. D., Ochs, H. D., Superti Furga, A., Valiaho, J., van Hove, J. L., Vihinen, M., Vujic, D., Vezzoni, P. and Villa, A. (2001) The mutational spectrum of human malignant autosomal recessive osteopetrosis. Human Molecular Genetics. 10, 1767-1773
[0317] 76 Sly, W. S., Hewett-Emmett, D., Whyte, M. P., Yu, Y. S. and Tashian, R. E. (1983) Carbonic anhydrase II deficiency identified as the primary defect in the autosomal recessive syndrome of osteopetrosis with renal tubular acidosis and cerebral calcification. Proceedings of the National Academy of Sciences (United States of America). 80, 2752-2756
[0318] 77 Stover, E. H., Borthwick, K. J., Bavalia, C., Eady, N., Fritz, D. M., Rungroj, N., Giersch, A. B., Morton, C. C., Axon, P. R., Akil, I., Al-Sabban, E. A., Baguley, D. M., Bianca, S., Bakkaloglu, A., Bircan, Z., Chauveau, D., Clermont, M. J., Guala, A., Hulton, S. A., Kroes, H., Li Volti, G., Mir, S., Mocan, H., Nayir, A., Ozen, S., Rodriguez Soriano, J., Sanjad, S. A., Tasic, V., Taylor, C. M., Topaloglu, R., Smith, A. N. and Karet, F. E. (2002) Novel ATP6V1B1 and ATP6V0A4 mutations in autosomal recessive distal renal tubular acidosis with new evidence for hearing loss. Journal of Medical Genetics. 39, 796-803
[0319] 78 Karet, F. E., Finberg, K. E., Nayir, A., Bakkaloglu, A., Ozen, S., Hulton, S. A., Sanjad, S. A., Al-Sabban, E. A., Medina, J. F. and Lifton, R. P. (1999) Localization of a gene for autosomal recessive distal renal tubular acidosis with normal hearing (rdRTA2) to 7q33-34. American Journal of Human Genetics. 65, 1656-1665
[0320] 79 Karet, F. E., Finberg, K. E., Nelson, R. D., Nayir, A., Mocan, H., Sanjad, S. A., Rodriguez-Soriano, J., Santos, F., Cremers, C. W., Di Pietro, A., Hoffbrand, B. I., Winiarski, J., Bakkaloglu, A., Ozen, S., Dusunsel, R., Goodyer, P., Hulton, S. A., Wu, D. K., Skvorak, A. B., Morton, C. C., Cunningham, M. J., Jha, V. and Lifton, R. P. (1999) Mutations in the gene encoding B1 subunit of H+-ATPase cause renal tubular acidosis with sensorineural deafness. Nature Genetics. 21, 84-90
[0321] 80 Steinmetz, L. M., Scharfe, C., Deutschbauer, A. M., Mokranjac, D., Herman, Z. S., Jones, T., Chu, A. M., Giaever, G., Prokisch, H., Oefner, P. J. and Davis, R. W. (2002) Systematic screen for human disease genes in yeast. Nature Genetics. 31, 400-404
[0322] 81 Sipos, G., Brickner, J. H., Brace, E. J., Chen, L., Rambourg, A., Kepes, F. and Fuller, R. S. (2004) Soi3p/Rav1p functions at the early endosome to regulate endocytic trafficking to the vacuole and localization of trans-Golgi network transmembrane proteins. Molecular Biology of the Cell. 15, 3196-3209
[0323] 82 Vida, T. A. and Emr, S. D. (1995) A new vital stain for visualizing vacuolar membrane dynamics and endocytosis in yeast. The Journal of Cell Biology. 128, 779-792
[0324] 83 Spasic, M. V., Kiss, J., Herrmann, T., Kessler, R., Stolte, J., Galy, B., Rathkolb, B., Wolf, E., Stremmel, W., Hentze, M. W. and Muckenthaler, M. U. (2007) Physiologic systemic iron metabolism in mice deficient for duodenal Hfe. Blood. 109, 4511-4517
[0325] 84 Tsiouris, J. A. and Brown, W. T. (2004) Neuropsychiatric symptoms of fragile X syndrome: pathophysiology and pharmacotherapy. CNS Drugs. 18, 687-703
[0326] 85 Lundblad, M., Picconi, B., Lindgren, H. and Cenci, M. A. (2004) A model of L-DOPA-induced dyskinesia in 6-hydroxydopamine lesioned mice: relation to motor and cellular parameters of nigrostriatal function. Neurobiol Dis. 16, 110-123
[0327] 86 Swoap, S. J., Weinshenker, D., Palmiter, R. D. and Garber, G. (2004) Dbh(−/−) mice are hypotensive, have altered circadian rhythms, and have abnormal responses to dieting and stress. Am J Physiol Regul Integr Comp Physiol. 286, R108-113
[0328] 87 Szot, P., Weinshenker, D., Rho, J. M., Storey, T. W. and Schwartzkroin, P. A. (2001) Norepinephrine is required for the anticonvulsant effect of the ketogenic diet. Brain Res Dev Brain Res. 129, 211-214
[0329] 88 Weinshenker, D. and Szot, P. (2002) The role of catecholamines in seizure susceptibility: new results using genetically engineered mice. Pharmacol Ther. 94, 213-233
[0330] 89 Weinshenker, D., Szot, P., Miller, N. S., Rust, N.C., Hohmann, J. G., Pyati, U., White, S. S. and Palmiter, R. D. (2001) Genetic comparison of seizure control by norepinephrine and neuropeptide Y. J Neurosci. 21, 7764-7769
[0331] 90 Weinshenker, D., Wei, A., Salkoff, L. and Thomas, J. H. (1999) Block of an ether-a-go-go-like K(+) channel by imipramine rescues egl-2 excitation defects in Caenorhabditis elegans. J Neurosci. 19, 9831-9840
[0332] 91 Weinshenker, D., White, S. S., Javors, M. A., Palmiter, R. D. and Szot, P. (2002) Regulation of norepinephrine transporter abundance by catecholamines and desipramine in vivo. Brain Res. 946, 239-246
[0333] 92 Weinshenker, D., Garriga, G. and Thomas, J. H. (1995) Genetic and pharmacological analysis of neurotransmitters controlling egg laying in C. elegans. J Neurosci. 15, 6975-6985
[0334] 93 Weinshenker, D., Miller, N. S., Blizinsky, K., Laughlin, M. L. and Palmiter, R. D. (2002) Mice with chronic norepinephrine deficiency resemble amphetamine-sensitized animals. Proceedings of the National Academy of Sciences (United States of America). 99, 13873-13877
[0335] 94 Weinshenker, D., Rust, N.C., Miller, N. S. and Palmiter, R. D. (2000) Ethanol-associated behaviors of mice lacking norepinephrine. J Neurosci. 20, 3157-3164
[0336] 95 Weinshenker, D. and Schroeder, J. P. (2006) There and Back Again: A Tale of Norepinephrine and Drug Addiction. Neuropsychopharmacology. 32, 1433-1451
[0337] 96 Weinshenker, D., Wilson, M. M., Williams, K. M., Weiss, J. M., Lamb, N. E. and Twigger, S. N. (2005) A new method for identifying informative genetic markers in selectively bred rats. Mamm Genome. 16, 784-791
[0338] 97 Rambourg, A., Clermont, Y. and Kepes, F. (1993) Modulation of the Golgi apparatus in Saccharomyces cerevisiae sec7 mutants as seen by three-dimensional electron microscopy. The Anatomical Record. 237, 441-452
[0339] 98 Prescianotto-Baschong, C. and Riezman, H. (1998) Morphology of the yeast endocytic pathway. Molecular Biology of the Cell. 9, 173-189
[0340] 99 Brickner, J. H. and Fuller, R. S. (1997) SOI1 encodes a novel, conserved protein that promotes TGN-endosomal cycling of Kex2p and other membrane proteins by modulating the function of two TGN localization signals. The Journal of Cell Biology. 139, 23-36

TABLE 1

| | Prader-Willi | Deletion 5q21-q23 | Deletion 15q21 |
|---|---|---|---|
| | Syndrome | (including | (including |
| Feature | (PWS) | DMXL1) | DMXL2) |
| Mental retardation | + | + | + |
| Hypotonia | + | + | + |
| Failure to thrive | + | + | − |
| Later onset obesity | + | + | + |
| Prominent | + | + | + |
| forehead | | | |
| Low-set, dysplastic | − | + | + |
| ears | | | |
| Palatal anomalies | − | + | − |
| Down-turned | + | + | − |
| corners of the mouth | | | |
| Receding chin/ | − | + | + |
| micrognathia | | | |
| Small hands/feet | + | − | + |
| Tapered fingers | + | + | + |
| Camptodactyly | − | + | − |
| Genital | + | − | + |
| malformations | | | |

“+” = present; “−” = absent

TABLE 2

| | | | | | | |
|---|---|---|---|---|---|---|
| | Nucleotide | Amino Acid | Ensembl | | Yeast Rav1 | |
| Exon | Change | Change | rs no. | SIFT/PANTER/POLYPHEN | Conservation | De novo |

DMXL1 MISSENSE CHANGES

| | | | | | | |
|---|---|---|---|---|---|---|
| 24 | 5476 C > T | R1826C | Not SNP | Damaging | Yes | Yes |
| 24 | 5947 A > G | M1983V | Not SNP | Probably Damaging | No | Yes |
| 24 | 6166 C > T | R2056C | Not SNP | Damaging | Yes | Yes |
| 11 | 1462 A > G | K488E | Not SNP | Possibly Damaging | Yes | Not Yet Determined |
| 18 | 3716 G > C | C1239S | Not SNP | Possibly Damaging | No | Not Yet Determined |
| 20 | 4765 A > G | M1589V | Not SNP | Possibly Damaging | Yes | Not Yet Determined |
| 23 | 5321 G > A | S1774N | Not SNP | Probably Damaging | Yes (putative | Not Yet Determined |
| | | | | | functional domain) | |
| 24 | 5777 A > G | Q1926R | Not SNP | Benign | No | Not Yet Determined |
| 24 | 6225 C > G | D2075E | Not SNP | Probably Damaging | Yes | Not Yet Determined |
| 27 | 6839 G > T | S2280I | Not SNP | Damaging | Yes | Not Yet Determined |
| 36 | 8198 G > A | G2733D | Not SNP | Possibly Damaging | Yes | Not Yet Determined |

DMXL2 MISSENSE CHANGES

| | | | | | | |
|---|---|---|---|---|---|---|
| 18 | 4466 G > T | R1489I | Not SNP | Possibly Damaging | Yes (putative | Not Yet Determined |
| | | | | | functional domain) | |
| 24 | 6032 A > T | D2011V | Not SNP | Possibly Damaging | No | Not Yet Determined |

TABLE 3

| Locus | Chromosome | Start | End | Size |
|---|---|---|---|---|
| 1p telomere | 1 | 849,476 | 4,915,415 | 4,065,939 |
| 2q telomere | 2 | 237,960,273 | 242,533,697 | 4,573,424 |
| DMXL1 | 5 | 118,429,983 | 118,617,721 | 187,738 |
| 6q16.2 | 6 | 100,943,472 | 101,018,272 | 74,800 |
| 12q telomere | 12 | 126,419,303 | 132,385,722 | 5,966,419 |
| PWS/AS | 15 | 20,249,887 | 26,232,997 | 5,983,110 |
| DMXL2 | 15 | 49,522,233 | 49,707,259 | 185,026 |

TABLE 4

| Feature | Patient 1 | Patient 2 |
|---|---|---|
| Hypotonia in infancy | + | + |
| Feeding difficulties in infancy | + | − |
| Failure to Thrive | − | +, necessitating |
| | | G tube when older |
| Weight >90th centile in childhood | − | + |
| Hyperphagia | − | − |
| Strabismus | + | + |
| Hypoplastic genitalia | +, L | +, hypoplastic |
| | cryptorchidism | labia majora |
| Spasticity in childhood | + | + |
| Unsteady gait with balance/ | + | + |
| coordination problems | | |
| Acquired microcephaly | + | + |
| Normal head MRI | + | + |
| Seizures | − | − |
| Nonverbal | + | +, had 40 words |
| | | but lost all words |
| | | at 3 years |
| Hyperactivity | + | + |

TABLE 5

| | | | Endocytic Delivery |
|---|---|---|---|
| Background | Plasmid | ZnCl₂ | to Vacuole |
| WT | M998I | Not tested | Affected |
| WT | Q1926R | Not tested | Affected |
| WT | ΔAAL | Not tested | Affected |
| WT | RAV1 | Not tested | Normal |
| WT | Vector | Not tested | Normal |
| Δrav1 | M998I | +/− | Affected |
| Δrav1 | Q1926R | +/− | Affected |
| Δrav1 | ΔAAL | − | Affected |
| Δrav1 | RAV1 | + | Normal |
| Δrav1 | Vector | − | Affected |

+: growth (+, +/−, −)

The application's sequence listing, which the Patent Office published only in electronic form, follows.

SEQUENCE LISTING (8 sequences)

SEQ ID NO: 1 - DNA, 177739 bp, Homo sapiens
  misc_feature (1)..(177739): NC_000005.9, nucleotides 118434983-118612721
tccggggctcgggatgagtcgcgggccccagctgagcggctccggctccaggcgcctgtcgctgcttctgccgtcgccaccgaagagcggccgccgcccctgagggaaggagggagggaagcagccgctgacccgtggcatgagctggatgcggtgtccgttgcaggactagggcgccgacatgaacctgcaccaggtgctgaccggggctgtgaaccctggcgaccactgcttctccgtgggcagcattggcgaccagcgcttcacggtgagtgagggaggccctcgcgtcgcccgtggcccggcctttgcccgtcattctgggccgagcttggcccagaacgacgggcagaggcgcgaggtcttgtctccccaggggggtccttaccacccagaacccagcagacctggcccttgagaactaaggaagcaaaaccatgtcggtcagtgaggtactgtatggagcctgaactcaagttagaatattttgtaggatttttaaagtttttggtctgtctgccttgggccagggtgctttgccaaagtcgtttgttcaaaaatctttgttgagtaacgagttgggggcttttttataccattctataggttcaaattgtcaaatttaggaatagtggagattggtttcattttgtattctaagttaaggtcaagtatctttgtagttaaaaagtgggtgtctcaaaacaattaccaattgtttgccatcaacaactagccttgagaacagtgtttttcatttattttcttttctaattccctgagaaataacttcggaaagaaaaaaaagccttttcatttttaaaaatatttcttggatattttacaataacctggtaatcccaggttaaggttgcttaacttgcttttcattggtcacatattgacaagaagagggcaccaaatttcgggctacttgtcagtatagtggcatttttctaccttaactataggtttttttttaataacaatttcaaaatataagtcagtaattgcacatgatacttttatctacataaatttataatgctaatgatttttgctacaatttgtgtagatacctctttagttgtgattaaaagtaaaacttgtcactgcctgggaatactaagtgctgtaggcttttttctttaaaaaaaataaaagtaaaacttaattttgtataagtgacacaaagtaaacaacgtaaccaatgccccaggtttaggagtgttaaatttctaatctttttctctgcttttaatttttctgtggtctttgttggtcagaataaataatactcagcatttaaaatggtggaggcatttaatgcctgaattgtacttttagaattgtgccaagaagcattttgttttcaaatagagactgtacctcccctttagattgactcatacacatcttaattatcgggattccaattctaaatgtttgcccagcctgaatacttgggaaaagagtgagctctgagggtcccagtgagcaactatagtttccttacacctgggcattgctctctgctcttgctgcttgagaggaaagtaaacatcatccttagaaggttttcctagtgggaaattataggataatattgttgcattctctgtcatttcctaaatttatatgagtgctttctccagtgtaaattctaagaacttttgctttttaaaaacttttgaaatgaggtctccctctgtcacctaggctggagtgcagtggcgggatcacagctcactgcagcctcgacctccccggcacaagccgtccttccaccttaggctcctgaggagctaggactacagattctaatcaccacggctggctaagttttctattttttgtagagaggggtctccttatgttgcccaggctggtcttgacttcctgggctcaagtgatcctcccacttcagcctcccaaaatgctaggattagaggcgtgagccaccatgcccagccctaagaattttttctaagaaggcattcacaatctatgtaagcagtggtgtgaacttcaaagcatatgcagtatgatggcctatttatatacctggatgcattcctctataaaaccttggtgaatgtctgtgtattgtttttaaggagagatcagttaatgtgccgaggaggattagatagatggtcatcctgtaccatcatgtagcttgttgctcagttctgctgaattttaaagttcatttccattgagtaggatttaatctcccaccaagcctactgcagatttcttccaggtctctggaagcattcagtaaataaactaaaaataaatttttaagtataaagagagttcagctctctttagttttgatggaattttaaggatttaacagtcatggttttcctttgcagcctgttcatccttgactctttaagttgcttacgctcattatcctggacacttatatacaccttaaatttttctctcttgaaatcgcccttttttcttctctcatgttaaaaggcagaatctattgtttacttcttgagttgttttgtgttgttttttttttttgagacggagtttcgctgtcgttgcccaggctggagtgcaatggcgcgatcttagctcactgcaacttccgcctcctgtgttcaagagattctcctgcctcagcctcctgagaagctgggattacaggcatgtgccaccatgccctgctaattttgtattttttagtagaggtggggtttcaccatgttggtcaggctggtctggagctcctgacctcaggtgatccaccagtcttggcctcccaaagtgctgggattacaggcgggagccactgcacccagccttgagtgttgtttttaaccttttttgattttgacttttctttgataggaaaatagtaaacattaatggtagatggtatgtgaagactaaaatatccctcagttgcattttacttgaagtggagcatgacatcttcctcttgcagttccccttgaaaaattcttttattccttttggtactttgtgttttcttttaggacagtcctgcttttgtaattcctccctttgcatgtttgcagataacttacgtgttcttggtttgaaagattacaagatgtgagatcttgttttactcataaagcctgacaggttttaaatggaaatgaaactgaatgccacttctcctattttctagatttgaaaatatgaaattaccaacgcagattagtctatttaagtattagatacttttttactacctcatcaggcatcaagctgttttgactttgctcttagtaagaaaacctcttgtgggcaatgaccatctctcctgtgctttcagagcactttctttgcatctttattctatcattaaccagtcttgccttgtggattgtatgtgtatgacttcccacgcttcattgtgagcacctagaacagtgattgaaagagtgtttaaacctaacagtaaggtcattacttggagttgatttccaatgtggtcccttttaattagctgtttatccattagcaagttatactcttggaatttctttttttctcttctgtaaaatgggactaaaagagtattattcatagagttgctacatgaaaaagtgctaagctgtaagtccatggtttagcacatgtaaaactctcaaaaatgtcagttttcataaaattaaggttatatttattgtaatgcctaacaatagaaagtacttcataaatcgtggttgaattaatgaaaaatggatagagaaaccttatagtaatataaatattaattgctacatttaaaaatagctttaatcatttagatttgagtccaaataaaatattcctgttagtttctttttttttctttttttttttttttggagactgagtatcactctatcacccaggctagagtgcagtggtgtgatctcagctcactgcaacctccgcctcccgggttcaagctgttctcgtgcctctgcctcccaagcagctgggattacaggcgcacaccaccacgcccagctaatttttgtgtttttagtagagacgggtttcatcatgttggccaggctggtcttgaactcctcacctcaaatgatccgcccacctcggcctccccacgtactgggattacaggcgtgagccaccgcgccctgcctgttagtttctttttcaaagtcagttgttaggcattttatcatcaacaagtgagcaactaggggagactttaggtatgctaagcaaaaattatttattttttccttatttactggaatgcttccttcatgcctttttccttgttaatttcctactgatcttagtatgtgagaaatctggtcttttttaaaaaaaaaacaaaaaaaaatggaggctggggtctccttatgttgcccaggctgatgtctaactcctgggctcaagtgatcctcccgccttggcctcccaggctgctgggattacagacgtgagctgccatgtccaccctgcaatttttgcttttagaattaaatgtattctgtttataaaaggcaacaagttaaaaagaagactagttaattagaatctacatttatagattctacttttatgcatactattgatatgatactttttttttctttttcttttgtggtttatctatacttagggttgaaactgtgatttgaatgatatggaaagggagataatttccaagagacagaaagattgtaccaatatataagactaactgtctctgatttggaacttaaacatcttagctatgggagggaaagcaaatatgttatagctccaatttccctttagtattagaaaactcagtgtttctagctaagggaatctagattagaaatcaaaagactgtaattatgtgagtgtcattagagaaatagggctgaataagtagtcgtcttcagctttctgtaataagcatccttgagtttagctctgttttgtttactttaaggaaacctttattggtagaagtgtaattgccaaattgggaggatgggaaggtgtttgttttttttttctgaaagggggcatgtgaatcttttttggtggggagaatatagaagggcaaagattgctactattcacatgtgaagaaagagaaaggtgtttgtggtgcataaaatattgcaagtactaaagtggacttcaaaatatgttggcctgttttaaaacataaagttttacagtgtttaagtacctttaaaatcattgaaatgatagtagttctcaatactttattatattttaaagataagaattgctgcatgccaaacttaaaacctatgtcatttaaataggacatataccagaaaggaattctttgggggtgtttacctggttttgttgattaaaactagaatactgactgttacagccttgaattttattgaaatttagaatatttgagaagattctctgccaaaatttaaagttgaaagttatattttgattatatgcttgatagcacacatgtgactcaattcttcctgtgcatcgtgtttattcttaaagttgataaacctaatgttgtatgtgcctaatagaaggattttcatttgtcaatttaattttattggttagtaatagattattctgattacagatcttttattattttttaattaaaacatttttaaataaaaagagatgggggtctcactgtattgaccaggcatgaccaggaactcctggcctcaagtgatcctcccatcttggcctcccaaagtgctgggattacagggatgaaccaacaggcccagtgctattttattttatttttttgaggcaggatcttgttatattgcccagactggtttggaactcctgggctcaggtgagcctccctgtgattacaggtgtgccccactgtgcccagtgattatagatcttttgacagaagcagctggtgacatcgacagtttatttgataagccagtgctgctattattgttttgataaccttctatattatagtcagggcaccttgaaatgagtttttgtgaataatttattttagacatctgtaaaaccagttttacattttgatttagaagtttcatgtattgtattacatcttcatcttaggttttttttttttttttttttttttttaagacagggtctcactctgtcacccaggctggagtacagtggatctcagctcactgcagcctctgcctcctggcctgaagcgatcctcccacgtggctgggaccacagacacgtgccaccattcctggctttttttttttttttttgtatatgtgtgtgtgtatatatatgtgtgtgtgtgtgtgtgtgtatgtgtatatatacacttaaaaatatatgtatgtgtacatatatacatttattttttaagtgtgtgtgtgtgtgtgtgtgtgtgtgtgtgtgtatatctgtacttacctggcgagaccctatctgtacttaaaaaatatatacgtgtgtgtgtgtgtatatatacgtgtgtgtgtgtgtgtagatatatatacacacacacacacgtatatattttttaagtacagatagggtctctccatgtaacccaggctgttttcaaattcctgagctcaagcagtccacctgcctcagcctcccaaagtgctgggattacaggtgtgaaccaccatgcctgggatgttttaggtttttatttaaaatcaggtagacggattattttttatttaagaatttagtggtacaaggattattttaaaatcatgcacagcccattctgtttcatttatttatttaaaacaagtttttaaagatgaggtcttgctgtgttgccagggctagtctggaacttctggcctcaagtgatcctactgcctcagccttccaagtagctgggactacaagcctgtgctgctgcacctggctcatattttcacttttattttcacaaactttctagtattaaggagaacattgaaactggagatttagtatgcccttttcttttagaaatgagaccatttatatggacttggagcttgaattatttgtccagccactgatgcctctgttcttagcacatatttgtgagatatttattttatttatttttttgagacagagtcttgctctgtcacacaggctggagtgcagttgtgggatcacagctcactgcagcctcaatctcctaggctcaatcagtcttcccacttcagtctcccaagtagctgggaccacaggtgtgtgccacaccatgcccagctaattttttattttatgcggagatggggtcccactatgttgcccaggctggtctcaaactcctgggctccagtgatcctcccaccttggcctctcaaaatgctgggattacagacatgacccactgcacccagtctgtgagatattcagatcaaggagttcctatcatgcctgtgttgcaagatgaagataactatatggaaatcagactttaattcttgaccttattacctgttgtttcaccgttattgctacacattttaactttacaatttatataatttagcatgagttaatttagcaacagtctttgttgccagtatcctttaactgtctggaccctttttgtttgcgccagtctgatgaaattccacacacttgatcagtctcatgttctttcttgttcctgtatatctcatgagcactactagactatgtaaagaaattcctgtggaaaataaagtcatgtttgccaacctcaaatgggacctcaaagctttccaggaatcctcccaccagtctgctcatttttcctttcttgtaccttctgaaacctcccatcccagtgctctcttaactcatataaacttgccacctggaatcattcagatggcagctccctcatttttgactacaagctgaaaaatccacttatatcagcatccattctttccttctctcctcctggtacaataaaataaatgtcccccagaattgtccagggttaatcagtcttcttggtgccgtggatcttatctattcaggctgtctctgggagctcagccctaaagttatctctacttttttctttccagagtttctaaaacatgcttaaaattctcatcttgaaaaacagccaacctgaaaatcctttgctgccacatccctctttatctttgacttcaaagtccttgaattgtctgtatttgttgccacttttatgtcctgctcacttcttaactcactatactttggcagcttttttctccttagtcactggtaaccacattgatgctaatttgaatcaacagatctcctttgtaccttgctttctctttggcatttgtcatgttgatcattttctccttagtcactggtaaccacattgatgctaatttgaatcaacagatctcctttgtaccttgctttctctttggcatttgtcatgttgatcattttttccttcactttccttggcttagttataccatactcgcccccaaccccaccctcttagtcattctcagtgttctttgcaagatatctttcttgtctgtcccttaaatattggtgaccgtcaggcctaccaggccttggtcctcttctcgtttcattctacatgcagctcctggtgtatagtctgtgatggtgagatccctgtctttagcttcatattgataattttaaatacctcttggattgttccacttgaagttgctacaaataatcaattttaaaatgttctgcacgcctgtaatcccagcactttgggaggctgaggcgggtggattgcttgaggtcaggagttctaggccagcctggccaacatgatgaaacctgtttctactaaaaatacaaaaaattagccaggtgtggtggtgggtgcctatgatctcagctactcgggaggttgaggcaggataattgcttgaacctaggaggcagaggttgcagtgagccaagattgtctcgctgcactccatcctgggcgacagagcaagacttcgtctcaaaaataatataagtaaaataaagtgttctatactcagtcaactcccctaccttggtgcaccttccaacccacaccccaatttgttttgttcgtcctcctgtgttcattatctctgtgaatggttccattatccagctggttttttttaagccaaagatttggaaatatccttaacacctaatcctcccacatttttcttatacaatcaatcaagccctgtagattctgtctcctgagtaattttaatatatttccacttgtcttttcagtagtgcagttactctgttgaaatagccttttaacctctgtccctgtatttaatcatacttgtcttcaacttaaacaatattgccagagggaatcattttaaaaggcagattaggataaggtatgaattcttcccaatgcattttactgtacttttctagtctctcatcacttttcctcctctctgtaatagctgcctccctaaactgtagctatatctaacgtctttccatttacacagtaagaaacgctttcttattttcaagccatttcacaagctcttcaggaaacttttcaattacccctccctaggcaaaaaagatgtaaatctggctaactcatccctaaaggcttggttttgatgtccctagtcagactagatgatcttcctatttgtagcctatcttataattcctttttcagatgttacccactagaattgtactacctctagggacagtgacttcatattgcattccaaacagctggcaaggtagggcctagtaaatacatgaggacaaatgggacaaagaaaacctgtgctggagtcagaagagctccaaggactaagctgtctgttctgggcaaggcaaagaagacagctgcgtttgggctgcctccccttcttcactcccagcttaaaatcctcaaaaagtcaaatccagatgacttcttggaaggccttagggtaagaaagtgtcatttcagctttctattcactccccacagaaatagcactcttccttgattcatttaactaacatttattgatgccatatgtgtgcgaggcattgtttattggtagctaaaatctttacctgagtcagaacctttttaaaataaaacatattttaatgtgtaaaaactgcttgagaacatactttgactcaaacatcttcacacttaagtcaattaacaggtatatatagttggcttctggttaagttttgtttttataggaggaataagaactcctaagtgttggatgcaagaagtgtagatgagaagttaatgtgaagaagatatagagccgcagaaacaaagattgaagaccaacttagactttaccaattttaaccagaggtacccttgcttaaccttttcgttttaactaatggggacaaattgagactgtgcatggagaattttgttcttacgtgtatttgaaggtagtttttggccataagttataaaggttttaagaaaagagttcctttggaaataaaaattgagtttttactgcatttggggtcctgctatctaaaaatatgagaaagaattacgaataaacatgattcttgcccttcaggagcctgattttattgttgtctgaattgattgctgactgtcataactatttcccagaggaagttttcttaaggttatatatatatatatatatatatacacacacacacacacacacacacacacacacacacatacacgtatatacatgttcttagaatgttttataaaatcaatttttattttatttatttttaattttttttagagacagagtcttacagtgtttcccaggctgcagtgtagtggcgcagtcgtaactcactgcagcctcaaactcttgagtttaaacagtcatgctacctcagcctcttgagtagctgggactacagacatgtgccaccatgcctggcttattttatttttttagagacagggtctcactctgttgcccaggttggagtgcaatagtgtgaactcagctcactgtagcttcaacttccttggctcaagtagatcctcccaccgcagtgtcccaagtagctgggacgacaggcatgtcccaccatgcctggctaatttttaaaattttttgtagagtggggtctcactgtattacccagactggtcgtgaactcctgggctcaagcaatcctcccacattggcctcccagagtgctgggattatttatagatgtgagctgccatgcctggccttattttattttttaattgatgcctaatagatgtacatgctttcaaagtaaatgtgataatttaatacattcatataatttgtgaagattaaatcactgtacttggcatatccagcaccttaaatatttgtgtttatgctagaactatttgaattcgtctagctgttttgaaatatacaatagattattgtaaactacatttacagtagtgatctgtccaacactaggtcttatgacttccatcaaaccgtttattagttccaattattcaacttctcttcatcgtctcccccaacctccttagccctctggtaaccatcagtctgctctttatgagatccacttttgtagctcccacatatgaatgagaacatgtgatatatttgtctttctgagcttggcttatgtcacttagaatgacctccagttccatcctttttattgtttgtttgtttgttttgtcagagtctcaaaaaggctggaatgcagtggcatgatcttggctcactgcaacctctgcttcccaggttcaggcgattgttgtgcctcagcctccccagtagctgtgattacaggcatgtgtcaccatgcctggctaattttgtatatacacacatatatattttttagtagagatgggtttcgccatgttgaccaggctggtctcaaactcctggcctcaagtgatctgcccaccttgacttcccaaagtgtagttccatccttgttgctgcaaatggcaggatttcattctttttaatggctgaataatatttcattgtgtacatatactacatttttttcatccactgatgggcactcaggttgattttattatcttgggtactgtgaatagtgctgcaaaaacatgggcacatagatgtctttttgatgtactgaatttcattcttttgcatatatacccagtaatggaattgctggatcatacggttgttcagttattaggtttttggattttttgagatagagtcttgctctgttgcccaggctggagtgcagtgacacaaccttggctcactgcaacctctgcttcctaggttcaagcgattctcctgcctctgcctcggagtagctgggattacaggtgtgtgccaccacgcctggctaatttttgtgtttttagtagagatggggttttatgtgagacaggctggtctcaaactcctggcctcaggtgatccgcctgccttggcctcccaaaatgctggcattacagccctgagccaccgtgcctgaccagtttttaggtttttgagaacctgcatacagttatctgtagtggttttactaatttacattcccaccaacacagtaccagggttctcctttctctgcatttttgagaacatctgctatttccagtcttcttgttaaaagccattttaactggggtgagatgatatatgtttatagtttttatttgcattttcctgatgatttgtgatgttgaacattttttcatatacctgttggccatttgtatgtcttctttttagaaatgtctgttcatgtattccccccctcaccccttttttttttaagacggagtcttgtgctgttgcccaggctggagtgtggtggctcattcttggctccctgcaacctctgcctcctgggttgaagcaattctcctgcctcaacctccaggtagctgggattacaggtgcacaccatcatgcccggctaatttttgtatttatagtagagacggggttttgccattttggccaggctggtctcgaactcctgacctcaagtgattcacctgcctcagcctcccaaaatgttgggatttcaggcgtgagccactgtgcctgaccttttccccaaaagcgttctttttgcttaaaattgttttggctatttggggtgtttgtggctccacctaaattttagggtcatttttttctatttctttgaagaatgtaatctgtatcagaataccaaaaatactcttcacagaaatggaaaaaacgatccttggctgggtgctgtggctcatgcttgtaatcctagcactttgggaggctgaggcgggtggatcatctgaggctgtgagttcgagaccagcatgtgaccaacatggaaaaaccccatctctactaaaaatacaaaattagcccggcgtggtggcacatgcctgtaattccggctactcgggaggcgaggcaggagaattgcttgaacctgggaggtggaggttgtggtgagccaagatcacgccattgcactccaccctgggcaacaagagtgaaactccgtctcaaaaaaaaaaaaaaaaagatcctaaaattgtcttctgtgtggtcattttaacaatattaattcttccaatccatgagcatggaatatctttccattttttgtgtgtctgcatcaatttctttcatcagagttttatagttttccttgtacaaatctttcacttctttggttaaattaattccagctggtcacaggggctcactcctgtaatctcatcactttgggaggctgaggagggcagatcacatgaggccaagagttcaagatcaccctagccagcatggtgaaaccccgtctctattaaaaatacaaaaaaattagccaggcatggtggtgtgcacctgtagtcctagctactcgtgagactgaggcgtgagaatcgcttgaacccgggaggcagaggctgcagtgaaccaagattggtgccactgcactccagcctgggcaacagagtgagactttgtctcaaaaataaataaataaataaataaataaataaatataataataataattaattctggattttttctgttcttcgtagctattgtaatgggattgctttctgatttctttgtaagattgctcgccattggtgagcatacaatggtgtatgctattctatacaccattgatgtatagaaatgctgctgatttttgtatgttgattttgcatcctggaattttactgaatttgttcatccgttctaacaggtttttttggtgcaatcttaaggctgttctgagtatacaatcatatcatttgtgaacaaggctaatttgacttcttcctttccaatttggttaccctttatttttttctcttgcttaactgctctggccaggacttctagtactatactgaataaaagtggtgaaagtcggcattcttgttccatatcttagaggaaaaatcttcagtttttccctatttagaatgacgttagctatgggtttttcataaataatctttattattgtgaggaatgttcctcctatgcccagtttgttgagggtttttatcataaagggatgttgaattttatcaaatgcttttccaggatctattgaaactatcatatggtttttgttcttggttctgttaaggtgatatatcacgtttattgatttacatattgtattagtctcttcatgctgctgataaagacatacccaagactgagcaagttacaaaagaggtttattggacttagagttccatatgactggggaggcctcacaatcatggctgaaggtgaaaggcacatctcacatggcaatggcaagagagagaatgagagccaagcaaaatgggtttccccttatgaaaccatcagatctcgtgagacttattcactaccgtgaaaacagtatggggtaaaccgcccccatgattcaattatctcccacctggtcccttccacaacacatggaaattatgggagtaccattcaagatgagatttgggtggggacacagagccaaaccatatcacatatgttgaaccatccttgggtccctgggatgaatgccactttatcatggtgaatgatcttttaatgtgttgttcaatttggtttgcaggtattttattgagaatttttgtatctgtcttcatgtgtgatatgggcttgtagttttttgttgttgttgttgctttgtctggttttggtgtcaggataatgctggtctcataggatgagtttggaagtcttcctttctcttcagtttttttgaagagtttgagtagaattggtgttagttcttctttaaatgtttgatagaattcagcagtgaaaccatcaggtcctgagcttttctttgataaaatactttttattatggcttccatctcattactcattattgatttgttgaggttttgaattttttttgaagagtttgagtagagttggtattagttctttaaatgtttgatagaattcagcagtgaagccataggtcctgagcttttctttgataagatactttttattatggcttccatctcattactcattattgatttggtgaggttttctatttccttatggttcaatcttggtaggttgtatgtgtccaggaatttatccactcacttctggattttattgaatttgctggtatatggttgttcataaggattctttttagttctttgatctagttgttttgtcttctatttaatttgttacttacttgggtcttctcttttttgcttagtcaagccacagttttgttgattgtaacttttcattaaaaagtttcatttcattgatctttttttttgtctctatttcatttatttatgctctgatctttattttttcttcatacaaatttgggtttgatttgttcttgtttttcaagttccttgaggtgcattattaggttatttgaagtctttctactttttttcttttttctgcttttttaatgtaagcatttattgctttcaacttttcttagtactgcttttgctgtatcctatagattctgttatgttgtattcccattttcatttgttttaagaaagttttaatttccttcttaattttgttattgatccattggtcattcaggagcatatttgtgaagtttccaagggttttcttactgatttctagttttattccattgtagtgagaaaaggtacttgatataatttctgtttttcaaaaaattgttcagacttgttttgtgacctcagatatgtctcttcttgggaatagtctatgtgctgatgaaaataatgtatattctgcagcggttaggtgggtgttctttaaatgtcaggcctattagatctagtgtatcgtttaactgatgttctttgttgattcttctgttagatctgtctattactgagagtggggcgttaaattctcctacgttattgtattgcattctatttagatctattcatgtttgctttatttttattattttttttttgagacagagtctcgttctgttgcccaggctggagtgcaatggcgctatctctgctaactgcaccctctgcctcccaggttcaagtgattctcctgcctcagcctcccaagtagctgggattacaggcaccctccaccatgcctggctaatttttgtatttttagtagagacagggtttcaccatgttggctagactggcctcgaactcctgacttcaggtgatctgccagcctccgcctcccaaagtgctgggattacaggtgtgaggcaccaagcccagcagtgtttgctttatatgcttgagagctctggtgttgggcgatagagatatttataattgtttatactatttctggattgactgctttatcgttatatagtaatctttgtctctttatagtctgtctttgatttgtagcgtattttatctgatgtaagtatagctagtcaagctattttttggttttcagttgcatggaatatcttcttccacccctttactttcagtctgtgtatgcttttgttggtaaggtgggtttcttgtgggcagtatagagttggttcttttttcttcatttattcagccactctgtgccttctaatgggagaataaagcccctttacattgtgttgttaggttgctgcaaaagtaattgtgagttttgcctttaaaaaagtattattggtaagtaaggatttactactagcgttttgttgtttttctggttgtttttctagtcctctcttcctttcttactgttatcctttgtggttaaatgctcttctctgttagtgtgttttactttgttactgtttatttttaaagtatttattattggttttggcactgtggctaccatgaggctcacataaaacatcttattgaagtgcgttattatcttaaaggtatgacagcttatatctcaaagaatagaaacaaataaaaataaaatgctatactcacatttttggctttcagttgtcttaatttgcctgtttttatattgcctgtctcttaaaaagttattgtagatattgtttttgatagatttgtcttttgggcttcataatagagttatgaataggttacacaccacaattacagtattcttctagatttgtctgtgacttaatttttccagtgagttttatatcttccaaaacaattttttttttgcatattagtggtttttttaatttcatgttgaagaactccctttagcatttttgcaagtcttaatggtggtgaatttcgtcaccctttgtctgggaaatactttatctctccttcatattagaaggataactttgctggctacaatatttatagaagacaacattttgtcttttagcattttgaaagtgtcatctagctccctcctggcctatgtggtttctcttgatgaatcttttgccagacaaattggagctccattatatatgcatatatatatatacatatatatatatatatttttttttttttttttttttttttttttttgagacagagtctcattccatcacccaggctagagtgcagtggcacgatctcagctcactgcaacctctgcctcctgggttcaagcagttttcatgcctcagcctcccgagtagctggaattacaggcgcgcaccaccacaccctgctcatttttgtatttttttagtagagatggggttttgccattttggccaggctggtctcaaactcctggcctcaagtgatctacccaccttggcctcccaaagtgctgggattacaagcatcagtcttgtgcacagcgacttcatttttggtactgccttttttttttttttttgagacagagtttcactcttgttgcccaggctggtgtgcaatggcgcaatcttgtctcaccgcaacctccacctcctgggttcaagcaattcttctggctcagctttcctgagtagctgggattacaggcatacgccaccatacccagctaattttgtatttttagtagagatggggtttctccaggttggtcaggctggtcttgaactccacacctcaggtgatccgcccgccttggcctcccgaagtgctgggattacagacttgagccactgcacccagcttttgtactgcttttaggattttctctttgtccttgacctttgagagtttgattattttatgcttcgggttagtcttttttttttttttttttttttttttttttttttttttgagaaggactttcgctcttgtcgcccatgctggagtgcaatggtgagatctcggctcactgcaacctctgcctcccgggttcaagtgattctcctgcctcagcctcccgagtagctgggattataggcgcccaccaccccacccagctaatttttgtgtttttagtagagacagggtttcaccatgttggccaggctagtctggaactccggacctcaggtgatttgcctgcctcaacctcccaaagtactgggattacaggtgtgagccactgtgcccggccacttggggttagtattatttgggtcaaatctgtttggggttttttggcctttgtctacctggatatttatgtcttttctgaagttttagaaagttttctgttacttctttggataagctttctactttctcttgttcaaatccctcttgaatgccaattcttagatttcatttttgaggtaattttttgtatcttgtaggcaacttcattacttttcttttttgtttttttctcctctgttttttttttttttttctttgagacagagtttcactctttttgcccaggctggggtgcaatggcgcgatctcggctcaccgcaacctctgcctcccgtgttcaagcgattctcctgcctcagcctcccaagtagctgggattaccggcgcctgctaccatgcctggctaatttttttttgtatttttagtagagacggggtttcaccatgttggccagggtggtctcgatctctcaaccttgtgatcagcccgccttggcctcccaaagtgctgggattacaggcgtgagccaccgtgcctggcagtcctctgtgtgtttttaaatagcctgtctttgagctcactgattctttcttctgcttgatccattcttctatggagagcctctaatgaatttttcagttcagcaaatgtatttctcagttccaagatttctgtttgattttttaaaaatatttcaatctgtttattaactttttctgataaatttctgaattgctttttgtcttatcttagagatgactgaatagttgtttccttaaaactattttgaattcttggtcagagagctcacatatcgcctactggttggggtcaggttccttgctttgtttggtgagatcatggttccctgtttgctgcatttatttatttatttatttatttgacagtgtcttgctctgttgcccaggctggagtgcagtggtgagatcacagctcactgcagccttaatttaccagctcaagttgtcctcccatctcagcctccttggtagctgggactacaggcacatgccaccacacccagctaatgtttttatttttgtttttttgtagaggcaagtcttgctgtgctgcccagcctggtttcaaactcctaggctcaagggatcctcctgttttggcctcccagtgttgggattacaggcgtgatccactgtgcttggcctgctgtttcttgtggatgcacacctatgtctttgcatttatggattagttatttattctagtctttggcttgttttggtttatattggatatctttacttggagattcttcactgctaagccactgcccctttttaggctccaggtgttgccttaagtccaggttcaccttggctctagtaaaccatcaaagggctgccgttcctaaagtgaggagatcccacaggaggtatctcagcagagggggaatgctggctaagggttcatgtgctggaaacctgtgggacaaacctcctacagggtggtgttactactgaacagcctctctcatgtggcatctcctttggctgagttatggagcactattttcagggatgcagataataatactgcctgccctctttgtttctccctgtcctcagagatatttctttaggcacttgtgatgcttcttatgggttagggctgggacagatattctgctagagaacccaatatggtggggaagctggctgttcaccataatctccctttttccagtgtagaaacaatgtttggggaaattttctgtgccctaagtgctgggcagaattgggggaggggtgttgtgaatgtggaagtctctttgtcttttttcatttctgaaaattgtcttttttcattcctgtggccccaggaactgtcttgtcttcatatgtgagttctgggttatttctggtgatactttcagcactgtatatttgttttgggttttctttttcttttatttaagaaaaattctttttctttttttttcacatagggtcttgctgtgttgcccaggctgatctcaaactcctgggctcaagcgatcttttctccttagcctcctgattcggtgggattacaggtgcaatgttgtatgaatctgtttttcattttctttggaggcaagtgaaacaccacctttttggagccacagttattattttttaaataacagctttattgaaatataatttacataccataaagttcacccttttaaagtgtaaattttagtggttttagtgtattaacaatgtgtattaccacaatctgattatagaacattttcctcacccccaagagaaatcccgtgtctattaccaatcactgtctatttgccactacccctagccactggcagctgctatcttacagccacttacattgcttgtttgcttatttgcaccaactgccttactgactctatggatttgtctattctggacatttcatataagtgaaataataaaatatgtggtcttttgtaaagttcatccatgttctagcatttactagtactttttatggcttaataatattccattgtatggatatatactatattttgtttagccattgacagttgatggacatttgagttgtttccctttgtggccattatgaataatgctggtatgaacattgatgtacaggtttttgtgtggacatgttttcagttttcttgaatacaggcatatcttgttttcttgctctttcccttattgcacttcaagtattatgatttttacaaattgaagttttgtggcaaccctttgttgagcaaatctgtcagcactatttttccagttgcatgcgctcactttgtgtctctgtgtcgcattttggtaattctcaaaatatttcaaactttttttattattatttttgaacagagtcttgctctgtcacccaggctggagtgcagcaacacgatcttggctcagtgcaacctctgcctcctgggttcaaatgagcacgcctggctaattttcatatttttagtagagactggatttcaccatgttggccaggctggtcttgaactcctgacctcaagtgatctgcctgccttggcctcccaaagtgctgggattacaggtgtgagccaccatgcctggccccttttaaaattattattatatctgttatgatgatcagtgatctttgttactattgtaatggttgtggaatgccaatgaactgcgctcagacctccctattcactgagacacaatgatatagaaattatgaatagtgacaaccctacagtgtcttttaagtgttcagaaaggaagagttacacatctctttctttaaatcaaaagctagaaatgattaagtttagtgaggagggtgtgtcaagatgggccaaaacctaggcctattgtgctagttagctgttgtaaatgcaaagggaaaattccaaaggaaactattaattaaagttctgctccattgaacacatgaatgataaggaagcaaaatagccttattgcttatatggagaaggtttgagtggtctggctagaagatcagaccagccacaacattcctttaagccaaagcctaatccagagcaggaccctaactcttctcaattccgtgaaggctgggagaggtgaggaagctgcaaaattaaagtttgaagccagcagaggttggttcatgaggtataagaaaagaagtcatctttataacctataagtgcaaggtaaagcagcaagcgctgagtgatgtagaagcttcggcatgttatccagaagatctagctgagataattgatgaaggtggctatgtgaaagaacagattttaaagcagatgaaacagccttctgttggaagaagatgccatctaggcctttcataactagagaggagaggtcaatgcctggcttcaaagcttcaaaggacaggctgactcttgttaggggctaatgcagttggtaactttaagttgaagcccatgcccatttatcatgccgagaatcctagagtctttaagaattatgctaaacctagtctgcctgtgctctacaagtggaacaacaaagcccggatgacagcacctatgtatacagcacagtttactaaatatttccagcccgctgttgagacctactgctgagaaaaaagatttcctttcaaaatattgctgttcattgacaatgacctgtgctctgatcaggcaggtgtacaaggagattaatgtagtttttatgcttgctaaaacattcattctgtagtccatgaaccaagaaatgcttccaacttttaaagtcttatttaagaaagttatttcataaggctatagctgctatagataatgattcctctgattgatctggacaaagtaaattgaaaaccttctggaaaggcttcaccattctagatgccattagggacatttgcaatgcataggaggaggtcaaaatatcaacattaccaagagtatggaagaagttgatttcatccttcacaaattactttgaggggttcaagtcttcagtagaggaagtaactgcagacttgcacaatcttttttttttttttttttaattttttatttttagacaaggtctcactctgttgcctgggctggagtgtagtgatgctcaccacagccttgaccttctaggctcaggttatcctcccacctcagccttttgggtagctgggactacaggcgtacgccactgcaaccagctaattttttgtgttttctgtagagctggttttgccatgttgcccaagctagtctttaactcctggacccaagcgactcacctgtcttggcctcccaaggttctgggattacagatgtgagccaccatgctcagccaagttcaataattttatttgatttaaaatttaccaagactacggagacagctttgttaacttctagtaccatcgctgagaaaaagtcaaatagtagtagtatgatgcagcagcagcaaaagaacaagggtaattcagaactagataagtcattgaatgatgaagtggtaattgttattagttggtattttcctctgtatagtactaagtgtttatttctgggattactttacatttctcaactctgcaagtgtaatatttgtattaagtagtaatttgtgtgggcttcaaaattagtatagacttgatgtgggaaaattttgggtcatgtttgacaaaatacttgcaacgtaatatctgaaattaggtagataatttcaggtacaacaaaggtgaagttgtgaagacatgagtttttttattccactgaaaggaaactgaaaatgttgtttagaagggagcaaatctaaattgtaaacatgtaaaattcaacacaatattttgagaaacagtgacaatcagtattctcaaaatttaatatcaaggagaaaaattagtttctaaattatttgaaagacaacttctcttaaaattagcctttggaatttattcttgctaatggtcttatgacaagccttatgatcccatcatggatatttatataggagaggagatcatcatgtgatttttttgtttgtttgagccagttcttttcactttgtgaaactagtggaatcataattgattattctttctaatttttaggtaaaattccaggcaagcatgttaactagggaagcccctgttggtaccatggaaatagcaggagaccaaaaatcaagagatcaggttctgaagccccactctgccactaagatgttatcaacttatttgggccttgattttcttttccatatagcacattcatttgtatgttctctcaagtcccatttttaatattttttgatagagtatacagaataattttggttttggtaggaattaaggtgtatatgaagtataattttttttttttttttgagatggagttttgctcttgttgcctaggctggagtgcagtggcgcgatctcagcttgctgcaatctccacctcccgggttcaagcgattctcctgcctcagcctcccaagtagctgagattacaggcatgcacgaccatgcccggctaattttgtatttttagtagagacggggtttctgcatgtaggtcaggctggtcttgaactccagacctcaggtgatccgcctgcctcagcctgccaaagtgctgggattacaggcatgagccaccatgcccagcctgaagtataatttttaaatatatgtgcgtgtgcaaaaatgaggagcaagtagagagttgataaaaactttatgaactcaggttggaaaacagtttgtgttagatgtcttattgttgtaacgtgtgccagtctataatatgaatcctaggagaacaaccatgtaccctgtaatggaaaaaactcccgtgatcaaagaaggtggtagggaaaaggacacacaaaagaagagttctagttgggagagttatgctaactgttgtaaaattgaaaaagagctatgaaatgcttggcaacaagtcttgagctatgtatactttcttttgttgtgatgactgtttttgtgaaattaaatgcttcatttattccacttataaattattagctgcattctaggcccttgtgttagaattgaggactagagtagagaacaagataaacttgaatccttcctttttggaatttaacttttaataatagatagggacaaaagacatttaaaaattgtgatatatgccgtgaagaaaataaacagtaatgtgatagaaagtaatgggagagatagtggttgggaattgtagcctgaatgctggaaagcagctaactagaaaagaccaggcagataaaaggcagataaacaccttgagatgtaaaaaggaacagaaacaagagccagctgagagaaggaaagaatagcctgagatgggtttatagaaggaccaccatttaggatattgaccatggtaaggtgttgagattttattccaagtgcagtggaaaactgttgaggggtttaagcagggaaaataacttggtgcagtaaacattcttcaaatatcactctttgtggaaatgcattagagggaggcaagaatggaagtttgctattagtagaataggagagagatgatcatggttcagtttagacaagggtggtagcattcactggagatgaaaaaagtgagccgggcgcagtggctcacgcctgtaatcccagcactttgggaggccgagacgggtggatcacgaggtcaggagatcaagaccatcctggctaacacggtgaaaccccatctctactaaaaatacaaaaaactagccgggcgtggtggtgggcacctgtagtctcagctactcaggaaattgaggcaggagaatggcgtgaacctgggaggcggaacttggagtgagccgagattgcgccactgcactccagcctgggcgacagagtgagactccatctcaaaagaaaaaataaaaaagtggacagagttcagagttgatgcatattttgcagaaaggactgacagaatttgctaataggctgtatatggggaggtaagggaaatagtgccaaatgtagattttttttttaagaaaacacctaaaattggtcttttaaaacatttattctccctgccttaaaacatgatagttaatactagtattctacatggtaaatgtttccttgacacttttatcatttttatttatttatttttttaggcttatgcatctggatgtgacattgtaatactgggaagcgattttgaaagattacagataatcccaggagctaaacatggaaatattcaagtgggatgtgtagactgttcaatgcaacaaggcaaggtttgtaatcttcttctaatatacaaatttgtttggaatatggtttttgtcaggataatctctgaagtgtgtatttcctattgaattagagacttggctttgtttcaaagatagtgtagctagaagaatttttggctgtctaagatgcattctatagagtgccagaaattctcttcttatataattttaaattatagcatcatcttctctgagaaagaaatacaatacttactgatatagaatgagtctaaagcttacgtatttaaaaggtgattggactgggggaaaggagtaacaatgaatcttcaatatttacaaataaactaaaggaaatgatttagaatatttttttttttttgtctgtgaacaggtagttatctccttgtaacttctatgtaacaagggctgtgtaactttttgtggaaatgaaaaactctttgagagtttataatattctaagcccataagaaaagtgaaaaactttatctggacttctatttgcatatgaaaagtagaaaggtaaccttgaaagtaaaatagcaacaacataaacaaaagtaacaaagtataaaattcttctagatcaggttaaatacagttcctgtagtaccagaatgagaaagtcatactactaggcaaggcagcataatatatagcttaaaataactccatataggcataggtggtaaggcctatatatagttgtagctagactggactgaacttcgcaaatacactcatatgattccactagaacattttgtgtaaggaatcaaaatggtcatattaagagtccatggacccaatcatttgtttttaaatctaatcttcatttgaggtaaactttctaggattaaaagttgccatctgggacttaaagatattaattataaaacgagtttctgttttctgaatctttacatatttgttggactactgttctttttgttacatggtattccttccctttaatatagttacaggtgtcctctatcttttgttgaggcctcttatgacttctcgctgtacaacaaaaatgatctttattatggaatgctggaaatctttgggttttttttttgttttttgtttgtttttgtttgtttgttttgttttttgtttttcagatggagtctcgctttgttgcccaggctggagtgcagtggtgcaatctcagctcactgcagcctctggcttccgggttcaagcaattctcctgcctcagcctcccaaatagctggaattacaggtgctcgccatcatacccggctaatttttgtatttttagtagaaacggggtttcatcatgttggtaagtctggtttcaatctcctgacctagcgatttgccctccttggcctcccaaagtgctgggattacgtgagccactgcgcccagcctatccttgagatttttattttcattctcttcatgtttgtttgatcttctagctcttttgttctgtaatctttcttaactgtataaaaacttgcttaataccatctggactcacatggagctggttaatgttaaaaatataatttaatactttccaatatgagctatctttttgtgatagactatatgacagtccaggttagaatgaagaaatcatggccatgtgtggtggctcatgcctgtaatcccagagctttaggagggtcaaggtgggcaaatcgcttgagaccagaagtttgagaccagcttggggcaaccctgtctctacaaaaataaaaataataagtaaatagccggacatggtagtatgctcctgtagtcctagctacccgggaagctgaggcgggagaatcacttgagcccaggagttccaggctgcagtcagctctggtggcaccactgcactgcagcctgggtgacaaagcaagaccccatctctacaaagaaaaacaaaaagaggaattaagaagtcatttggttttataatcatttaatgaagaaatattttcttcatttacagatatcagtattatcatagtggttccttaaagtatcaggaagaaaattggcaggttctggtacctggggacttctgactgtttacatttaagaaggaaatgttctttgggaagccgaggcaggtggatcatgaggtcaggagttcaagaccattctggccaaaatagagaaaccccgtctctactacaaaataaaaaaaaaaacattagctgggcgtggtggcgggcgtctgtaatcccagctactcaggaggctgaggcaggagaatcgcttgaacccgggaggcagaggttgcagtgagctgagatcgtgccactgcatttcaacctgggtaacagtgtgagactccgtctcataaaaaaaaaaaaaaagaaggaaatgtcataggcacctgtatttttattattactgtttttttctttgtactgtactaccacctaattcatttttctgagaaaattaatcctcatttatccttttattcatcagcttcaaagtattcttagcccattaccttggaaaagttcaaattgttcaccttggtgtgaggccttttacaacctggctcagatctgcctttttagtctcaggtacactattgtgttataaggagcactctcttcttggtgggatggtggtcattcacctctaaacatacattgcctcttttaatctttacatctgttttctttttttttttttttttttttttttttgagacggagtctcactttgtcgcccaggctggagtgcagtggcgtgaactcggctcactgcaagctccgcctcccgggttcacgccattctcctgcctcagcctcccgagtagctgggactacaggcgcctgccatcgcccggctaatttttttttgtattttttagtaaagacggggtttcaccgtgttagccaggatggactcgatctcctgacctcatgatcctcccgcctcggcctcccaaagtgctgggattacaggcgtgagccaccgcggccggccttacacctgttttcatactatgccctatttataaagttgaatactcactgctttttgaaatcccacccataattaaaggcccaaactaaacacttcctccagatcaatgcagcacaagtgatatctatatcctaagaattcagaagccttaaaatatccattcacagttttttctccatgtttgttgtgtcctcatttcttaccttctctttactacatcatatgtttttttttctatccctgattcattcatttaatctctctctctgtttgatttccaatattttgatgttctttatatgagactcactcaagttatagtagtagttaccttataaaacagagccaggaaaggttatgatccatcaatttaaagagtaaattcaaaggataaaatagaatatgttttaaaatgtactcagggagtttccagaggaatagacctaagttatatttttgaaaagttaatgtacactgacagaattgtcaatttagaggatggatgacgacaattaacatttactgtgcatattgtatgtcacttattatatgttaggtgttttacaaatgttatttcaaccctcaatgctgttaggaaggtagtgttgtacatattatgaacactgtaatggaaactaacgtttggagagattaagttgctagttaacgtagtaagttgcagttctaggattctaatgcagatgtgatagtcttcaaaactgacattcttaagcatcagtgaatgaaattgtgtgtattggcatatttaaagttatagtattcatttctttgctttttttgattcataagtaagttaacatatccctaataaattctttttttctttttaaaagattgcagcgtcttatggaaatgttatctccatttttgaaccagttaacctaccaaaacaaaagaaaaatttggtcagtaatttatgatttcttcttttaggaattgaaatgttttaagtattgaaagagtgtaaaatcagagtgatcattgagtaaatcggtattacttatatactgtaattgaacctacatgttaaattccattttgatgttaaaaatatatttaaatttttcattggaatagaactaaaataaattgtgccaatgaattgttgaaatgctttattattttatttctgacatttttaattttataatatttcaagagtcagtaacctaaagtttggcactactttattgctagtatcaaataccgttgtccagccatatgtggtactctttcctttgttttataatctacctttatacaggttttctgcctcttcagggcttaactttcttgcattatttagatcatgtaatacagtcgttaacaggtcaatgaatgtttttctttataagcaagctgtactcagaaatagttctgaaaactggttacccaataatttataaatattcgaatcatgttagcagattttataggttctttaatgcttgtgcctgtaatcctctctatttgggaggctgaggcaggaggattgcataaggccaggagtttgaaaccagcctgggcaagattttaaaaaaagtttagccaggcatggtggcacatgcctatagtctcacctgctcaggaggctgagatgggaggatcgtttgagcccaaaaatttgaggttgtggtgagcaatgatggcaccactgcattccagccagggtgacacagtgagaccctgtctctaaaaataaaaataaaagcaaaccgtctgaaagaagataagtgtagtgtcattgaaagagcagtgtaagggagctaaatgatgagaaattatgaacacaaggaaacaacagacactgaggtctacttgagggtggagtgtggcagaagggaggggagcagaaaagataactattgggtactgggcttaatacctgggtgatgaaataatttgtacaagaaaatcccttgacacgaatttacctatgtaacaaatcttcacaggtactcccaaacctaaaattaaaagattttttttttttttaaaaaaaaagaaagagcagtgtattgggagtcataggactggtttctatttctgggtctatctagctagttggtcttaggtaagtcagccttaagaaattctttgcttaactctcaaattgattactatctattcagtcttgatgggaatattattaggctaacatgtcaaagatggtttaggaatgtattaattataaaggactaaactgttttaatagcagacatacctttatatatcttttgatagttttcatgtcatcttcacttagctcattagtattttacaaattacttcaaacctagtttgtgcagccattatttcttctttttatgaataaggcagtagagtaggctcaaagaatatagtgacttgacaagtgaagcagctgttaagccacagaactaagagtaaaaccatctgtattgattcctaggtgtgagtgttctttccttaccttgtgttaatgaaaactattttctgagttaattgatatttatctttaaatttcatagaaatagtgttcacacttctgatttctatttgtttttatagattgcctagtgaatccactatttgagcctcttaaagccttaagaattagtaattggcagtactaaaaagaattttttaaggcgattaccccacccagcccagaacagtgtatttcagtactcaataaatatttattaaataaaataagtagcttttgaaaatcagtatgttatgttaaaatgcctttattgggaaggatagaatagagaatttcaatgtttgcccattttctcctttcctaattataattgatgaatgtaatgtataaaactcaaaaagaggctggtttattggcttatcagcactgactttgcagaaaggacaataaaaaacttgatgaagaagggcaaaagtggatcaaatggtgaagttatagacttgaaagatgtataaaatctatgattctaaaatatagtttcagaatgtttagatccttgtaaaaatatattctttccttttctttgtatattatggagtattcttgtgaggtggtggtcttcatgagagttgcacatcacaactaccattggatacatgtgcccaaatcctgctctgggaatttctacatctgtagctgtgggattgtgtctatgcacttatatgtcttgttctagagagggttctggtatgtactgtgattgaaagacattcctgcaaggcagtgtttcatgaaagcatattctgtaggtcacctatgtcaaaatcacctggggtgttaaagtacaggtttctgtgccccatcctgaagcttttgaacctgaatttttgggcacaggtctcggaaatttgaatttttagtaacatctcaggctattatttgttgtaccaaagtttgagagccaccacattaagagagtatgaatctcaatctgtaattgggctgtgaactcaacttagtgtaggccacaacccgaatttaaaaagagaatgaaatagagaaaatatcagagtatgtcacatgtaataaggacaaacataggttatatttatttgtatgtgtgtgtgttctgggtcagcatacattgtgtatttcttactgatttgcaggcagaaaaaaagggaaaaatttcgctttaagaagttgtaaggccataaattatatagtagtatcaaaatgttacatcttttattctgaattttcccacatactattatgatctcagatggggacaaaacagtaaaagagaaggaaatgtcaaatagtaaagccacagacacatttaaaattaactttttaactgtaataataaagtaataattaaatctgaggctattaagactgttatccaaggtagcgtatggttattgattgtttatactaaagatagcattttgaccaccagttatggatattctctcacataccttctttatcatgtgttctctatttttgttgactgaactgaacattttgttatctttaaaattgactgcctgtgttattgtaagaataacaagcataaacgtacacatttgacagagaaaatatgccaatcataatgggctaaatgacttttcttaattttaggaattatatagtcagtggcagaaaagtggccaattttttctggaatcaatagcacacaatataacctgggatcccacaggtaagaaaataagcaggattaactaaaatgaaatatcacttgcctagttgttcttatttttattactcttatgtatttcacttctgctgggtgtgaggttgtggggaataccaaagaagtaaaatggattatgcccttttagagtttatactgaaatgaagacagatatgcactgtaagaaatgagagaatgttctaagtgccataataggatacccattgtttttggaaagagatatttctctggagaattaacgtttcattgaaaaggagcctttggacctgagagtaaacagactttagcaatgagagttgggtagatggaacaggaaaaaagtgaaatttaagaaaatatatgccaggcgtggtggctcacgcctgtattcccagcactttgggaggctgaggtgggcagatcacctgaggttgggagttcaagacccgcctgaccaacatggagaaaccctgtctctactaaaaatacaaaaaattagctgggcatagtggcgcatgcctgtaatcccagctacttgggaggctgaggctagagaatcgtttgaacctggaaggtggaggttgcagtgagctgagctcatgccattgcacttcagcctgggcaacaagagtgaaactgtctcaaaaaaaaaaaaaaaaggaagaaaatataatgaatatatgtatcagttatctatttctgcattagaaaagcatcctccaaaatgatggatggcttaaaacatccatcattttattgcttatgattcttttggtcaggaagactctgtgggaatggcttgtctattgttccatgtggtagtgactgaagcagtttatctgcagctaaaagatccaagaaaggctttgttcacatatctgggccttgctgcttgctatctactggaatgcctttgttctcctccacatggcctcttctgtggccctctgtagcagggcagcctggattttacatggtggctgcattctgagagtgaaagtagaagctgcaaggaagtcccagaatgttattgctgccacattatatggtcacaggtccagctaatattaagggttgggagacatagactccccctcttgatgaaagatatggcaaagtcatattacatggaggcatcaacacagagagacataatttattgggagccatttttaccattctacgaaagtgagggaaggcacagagagagaaagcataagatacattataataaggattagtatttcactgggctgagtctcagtggtggtaaggagataagaccttaccatgttataggagacctttaaagtcatgctaaaaatttgaatttaattctttatggttgtctaaaaactataggttttcaaaagaggctagtcatacaagatttatggttttgcgagatttgtctgctagcagtgagttagaagggtcagtggcaaatggaacaggagaaggagtgacctttggagaggttgtattctcattagtctggatgagaaataagaacttatttcaatgccttttccatagtaggtgttcaattaatattaaatgaattaatgaatagtgaaaggtatacatggatatgaaatgtgtttaggcagtagaattgacattacttaacaactggatttgaaattactttgagagtatctatgaccacacaaagagtaatatgtaggagttagaggtagtggaacataaggtattaattggatatgtggaccttgagaagcttgtatatcataaagcaatatatagacatttgaatctagaacataaaaagttatctttggggctgggcacggtggttcaaacctgtaatatcagcactttaggaggctgagtggggagaattgcttgagcccaggagtttgagaccagcctgggcaacatagggagactccatctctacaaaaaaatttttgaaaagttagtcaggcttggtggctggcacctgaggtctcagctattcaggaggctgaggtgggaggcttgtttgagcccaggaggttgaggctgcagtgagccatgattgtgctactgctttctagcctgggtgacagagcaagaacttgtctcagaaaaaaaaaaagaaaagttatctttgagacatagaagtcatcagagagagatataaaactattggtaaactgattaatgcctttcttttgtgtccaaatttaatattttatgttgcctaattcataagattttctgttttagactttttatgcttttttcctgctttactatccataatatcctgctttaatatctgtaatttaatatctgtaatatctaattcttagagtttgaaatcagtataccatattatatcttacctacttttgttccattccatacctgggattaagtttatattctgtattaaattcttaatcttttatgggatatcttaatgttatcttcagtttatattaagcaaaagaaaagttgtatctgttggtaagttcaaaagtggaataatcaacatatttaaatggaatgtttcattacttcttgtgcttttttttggcccctgtctatgaaaccttctgtctagttgctctactatttattgagcttctgcttagtgcctggcctgtgctagagactttgtgcatattatatagctaatccttacaacaactgtatttaaacctcaaattttatagatgagaaaattgaagttcagaaattacccaactagatcaaattcacatggctaattaagcatcttacttgggatttagacacagggatttctgatctaaagtctatgccagagatccactttccttttgaaacaagaaaacgagggcgaagcatgctggcccatacctgtaatcccagcagtttgggaggctgagttgggaggatcgcttgagcccaggagtttgagaccagcctgggcaacatagcaagaccctgtctcttcaaaaaatttaaaaaagtgattgttctagaaatacacaaatctatagtcttaaattgccaaggtgaatgccatctttattgtcagcttttttgccaaaattgcttgtcttttgtatggatgatagcacggccttctacttaattcccaagtcatagagttggaatctgtcctttaaccctcttgttttttctctgtatttatttggtgtcaaatcttgacaattctttttttcattttttcttgagacagggtcttgctctgttgcccaggctagactgcagtagcacaatcatagctcactgcagccttgactccccaggcttgagtgatcctttcacctcagcctccctagtgtctggtactacaagtgcgtgtctaactaatttttgtaatttttttctgtagaggcagggtttcactatgttgcccagacaggtcttgaactcctgggctcaagcagtcctcccaccttggcctcccaaagtggtgggattacaggtgtgagccactgcacccagccttgacaatactttttgaaatggctttcaaatgcttgctttttaaatatttggttgagatcctcattatttaccatctgaattttttttcctttttttttgaggtggtgtttcgctcttgttgctcaggctggagtgcaatggtgtgatctcaactcactgcaacctctgcctcccgggttcaagtgattctcctgcctcagcctcctgagtagctgggtttacaggcatgctccaccatgcccggctaattttgtatttttagtagagatggggtttctccatgttggtcaggttaatcttggactcccgacctcaggtgatccacccgccttggcctcccaaagtgctgggattgcaggtgtgagccaccgtgcctggcctaccatctgaatttctatagttaattaaccaggtttaatagtttaatagttggttaaccacacacttatggtttccctgatgttgtctgtctctggagttgttttctaaaaagtatttttaaccttctttgtatactagagtctttgaaatttcgatgtaagttacatattatctttctggaaaaatgcacatattgtatgtgtgatttttgtatgttatctcaatagagggagactcacaggcctctccatctgttgactgcccctcttccagttaagccctcttgttctgaaatacagatccaattttgtaacaactcccccacaatcccccactgccacttgaaaatcttttactcccaactacctataacaaagtccaaacgctgtgaacttgaaaaactcttcacagtctcaccttggcattttttccgtagtaattttttttctagcctatctgtgtacgttattcgttaacctataccagattaagaggcattcttgggaaaatacataaatttatatgtcttcatgcctttgttcatgttaggtttcctttctgaaatgcctgtctcttctgcttattcatccattaaggaccaggtttcatttcctcacttttcctggcacttttactacaggtacacattaatgtctccttcctgtgggcttccataaagctttgcatgcatttctatcatgtatgtaacacttccacatggtatcatatttccatgtctttctgctgaaatatgaactcatgaaaaacgacaatgttttgtttgtcattgtatttccaatgtctagcacagtgcccgggacaaagaagatgctcattaaatacttgttaagtgagagattataagatttcttcctttctatctcaagctattttaacgaaattaaaatacagccttctcctccgttcttcaaaattttttttgatatttgacttttttttagaagttgttttatatgaaattcttgagcatgtaaattaagtcactattaaatacctaaataataaatgaggaataatattttttttaggcagtcgtcttttaactggttccagctatttgcaactctggtccaatactaacttggagaagccaactgaagatgaaaatttaaataaaacagatcttaactttggagattggaaatgcatttggcattgcaagtaagcaattaatcaggggagtaaactgataaacctgttgttctatgtggttttattataaatgtattttagttgtgtaaaaccacactgacataaaaagtattgatttttagtctatgatatgctttttcttatacacagataattctctatttcccgtgttctacaaatacattttttaaaaatgtcaattaaaataggaagaaacaaatgtgtaaggcttacatgaagaccattaaatacaaacttgccaaattatatgaaaagatagatgactttcatgcttttgaatggaagacttcctattctgaagaaatctatttttcccacataatctatatattgaacataatccttgccaaaatctgagtggaatttctattaagcatagttctaaactctacttaaaaggacaaatatgggaaagtcagagaaattctgaaagaaaagaagaatgaagatttgcagtatagtaaaatgaattctaatgccacagatgatcaagcattttgttattgatgtaggaacagacagattaggatccaggattagactctggagtgcaatgatgtgaggcttactgcaacctccacctccctggttcaagcaattctcctgcctcagcctcctgaggcactgggattacaggcacgcgccaccacatctggctaatttttgtatttttagtagagacggggtttcaccatgttggccaggctggtcttgaactcctgacctcaggtgatctgcccgcctcagcctcccaaagtgctggcattacaggtgtgagccaccgtgctcagccttaagatagtcttttatagcagggaaaactagctagctctgtagacgggaaattaaattagagtctttcatacctgataccaaaacaaatgtgagatggaaaaaatttctataaaatgaaacaaaaatattagaggaaaatacaggtgaaattttatattttagagctacattgtccagtatggtagccactaattacatgttattattgagcacttgaaatgcaactagtccaaattgagatgtgctggacttcaaaaatttagtattaaaaatagtgtaaaatatctctaacattttaaaaaatatgttgaaatgatgtttttatatattaggttaaataaaaaatattaattttgcctgttttaactttttttaaaaatgtggctgataggaaatttaaaattacatatttggctaacatttgtcatttatgttatattgctgttcgacaagaaatgctgctttagagttagggaaagactaagaatgacacccaaactggaaatggataggataggaaaaattaatagttctaaccgtatcaataaaacatttctataaagcaaattgtccataagggaagaaacacaaacatgaggagaaatatgtgcagttttgggcaaatgcgtttttaaaagtaggccttaaattagttagaaaagaacaggtataacaatagtaagcaacattgggcaatggagagaaaattttaacaagatatagcacatattaaaaataagtgcaataagaggtgatctcacttgaaatcaagaatgtgaaatgttcagaaaaaggatgaatgttatctaatagtgtttagagaaataggtgctcttgtatactgtcaataaagcagtacagttgatattatctttattttttttttttgagacgaagtctcgctctgtcgcccagcctggaatgcagtggtgtgatctcagctcactgcaagctccgcctcccgggttcataccattctcctgcctcggcctcccaagtagttgggactacaggcgctctaccaccatgcccggctaattttttgtgtttttagtggaaacgaggtttcaccatgttagccatgatggtctcaatctcctgacctcgtgatctgcctgcctcagcctccccaagtgctgggattacaggcatgagccaccgtgcccggcctgataatatctttctagagcacattttggaagtatgattcaacaggcttaatttttttcataccctttaaataagattgccaggtttcattccttcattcaacaaatatttgttgaatggttccagtcagctttaaagatgcttagaatattgctatgaacagataggggtagatagaaaataaaccagtaaactggtgtaacaggatttaagtgaaactgactaggtttatatgaagtggtgatagcataaatatcacataccaaagtaaggcagacgtcccatatgtagaatttacagaggagatttcaaaggagctcgttccatgtattttgcacccctcagataggtaatgggttaacatgtagaaagggaacagaattttgcataaataattctttagaaagagctgtaggctgggctcggtggctcacgcctgtaatctgaacactttgggaggccgaggtgggtggatcacctgaggtcggcaattcaagaccagcctggccaccatggcgaaaccccgtctctactaaaaatacaaaaattagccaggcgtggtggtgcatgcctgtaatcccagctacttgggaggctgaggcatgagaatagcttgaacccggtggtggaggttacaatgagccgagatcacaccactgcactccagcctgggcaatagagtgagactccatctcagtaaaaaaaagaaaaaaataataatagtattttgtcttaaggatatccttaggattaaccagatgttctaaaaatgtgtgtacaggcatgttcacttctcttttttgttcttgttgcagcaaaaattagaaaacagcagtgaaaaattatttgaaatcattgtatgtatatatatgtaaacatatacagtggaatataagccagtaaagtaataatgtagatctgtacacctgcacacatatacacatcttttgcatctatatgcaaagatgttcatgacatatttttgttgttgttgttgttcgagacggagtcttgctctgtcacccaggctgagtatggtggcgtgatcttggctcactgcaacctctacctcctgggttcaagcaattctcctgcctcagccttccaagtagctgggattacgggggcatgccaccacgcctggctaattttttgtatttttagcagagatggggtttcatcatgttggccaggctggtctcgaactcctgaccttgtggtctgcccacttcaggctcccaaggtgctgggattacaggcgtgagccactgtgcccagcccatgacatatttttttagtgggtgataagtgtgacttcagtttctagccctacttttcccaccttttcctgcagaaagtagagagagtggagagaaggatttggaagtttatgtattaaaatgttaacattggctttgtctgaggaaaggatgtggtggtactggtgaaaaatgtaaatgatttcatttggtttttatctacctgtatcaacttttctgtaatgtattatgcttaaaatcagaaaaaaaagttatttgtatctgaaatgaaatgtgacagaattcctctttggatatctttataaataaatttagaattgacctatctaatcatgcatttgagcaaagaaaaggaaagcagtgatagtggtgagtgtcttgagatcagtatatatgagtagctgtaagggaaggcaatgaagagaaatgaaccaaagttcctttgagaagaaaaggcaagtatctaacaagtatataggtgaagctggtaggctgaattcctaattgttgcaagtcccctgttaacccacacataatctttaattaggtaagtattaccctaaggcaaacttattatatattatccatgaaaatgtatgttggcatatagggatccatggttctggaaactagattttcagatttaaaaaatgaaaccattctctctcattctaagggaatgaaagttacaacttttgttttaggctttaaagattttgacaagccattccttccatgagtctatgggtgtatgtttttatatttaaaatttatcttactaactagttcatttttcaggtacacaaagatgtgggtgtgaaacttataacattttctgtcttttgaaccaattgctgatttataattttgagaatattgaactttttctttttagttttcattgcaaattattccttatctgtttaatttacagaactgcttcccaagttcatttaatgaaattttcaccagatggagaattttttgccactgctgggaaggtaaattgtgaaaatgctattgccaaattatgtgtttatagtttactttgaaactttaaaaacatcaactggcttcattcttttatttatttaacttgaaaataatagtttccattaaaaattgttttttttgtttgtttgttttgtgatggagactcactctgtcatccagactggagtgcagtggcacgatctcggctcactgcagcctctgcctcccaggttaaagcgattctcctgcctcagcctctcaagtagctgggactatagccccacaccactatgcccgtctaatttttgtattttttaatagagacgggatttcaccatattggccaggctggtcttgaacccctgaccttgtgatccgcccacctcggcctcccaaagtgctgagattataggcgtgagccaccatgcccggccattaaaaattttaaatagcaaaaattgactccattattgtggtgttaaaagactgtgtgatataattgaaattacatagacttaggggcagatctggatataaatctgccatttaccagctttatcaccttgggcaagttaatcttattgagcctttcttttctcatgtgtaatatgaggataaaaacacctacctcataggtcattaatcgtaggattaatttagacaatatatgcagtatagagtgaccggcacagtgcctttcatgtagtatacaatcaataaagcatagcttcaatttatattaccttttagctgatgtgtattaggctgtttttaatatataagacttcataggctttctagaaagatactagtaaccatttctttagtgtgtatactttattacctgtctattttaaagcaatgtatttctttgaagttatttttattcattggttcatagagcatttcacgagctgctaataagtcaaattattgttctcatggctcaaagcattctgcaaactaagagtgtaagttactctaaaaccacagtaaggtttttgttttttaggagagaagttgagctgtttattctgattgactttacaggtgggaactcagttatagcttaaaagcagtacctggtacattctagtcccctttgcttttcctttatttcccaaattatgactataaatttgattgtacaaagaatattttatatagtatttatatattaactcatttttttcaccatcaacattttctttgaaaagtcacatgaaaattcatgaaaagtatctctttttttcaataattagcagtcttcataagtctgctagtggtgttgattacttatttaatatttggcttactggaaaagacgtccttaattttatctttcagtgtttcctgaatgactccattccccttactctagtaattagcaagcatttttcttgaacacagaatacacacattcacacacttcagtttttaaagcacagttaggcaatgctaatagaaaagtgccagaatcagaattttcttaattcctctgtgctcaacgtctcttcccatccccaagttcttgccattggggagaaaattcttacttttgctatttgatttaatctttaattctgatctccatgattttctgttttgttttttttttccttaggatgactgtcttttgaaggtttggtataatgtagaaaactggcggacagctgttacttctccagatggaagttcagaaaaacaatcccaaggagaaattgacttttcttttgtgtatctggcccatcctcgagcagtaaatggattttcctggcgtaaaacaagcaaatatatgcctaggtcagtggattggtcatttccctccacatattaagggagcatcatctttgttactttgattgcttctctcacttttgagagtccatagttacaggacttctgagcctatgaagattagagtaatattaaatcgtctctggcctgcacatctctggctgtggctcaactatgtttgatgcttaggataagagccgtattaaaggagtttaagctgggatagtttactccatatcagatgtctttaagtcacagagttgtacatattttctttttctttgtgttttgtgtctaattctgtcatctattttctccagattgttgtttgtttatatttttacataaatactctgtcgtcttgtaccttctagtatgtcttccctggttttcttcttttaaaaaatagctttattaagaggatatatcatgagttcttgtatgtttatttgactacacccagcatatgtgaggaaaagagagagtaggttaataccctaccttattcttctttgaaacagctataagtttaaccacaaaagcacacagtgacacacacatacatatcctcagtatcttcttttttttttctgtagttctggaaagagttaatgtaatactgaattttagtaggttatagagacctattacttaaatacaggtataaattccctatttttgtttgttttttatgtgtttttgttttgtttagttttgagacagggtcttgctttgtcacccagactggagtgcggtgccccagtcatggctcactgcaacctctacctcctgggctcaagtgatcctcccgcctcagcgtctcaaatagcggggactacaggtgtgtgccaccatgctgggctaatatatttttttcttttcggattttttgtagagatggggttttgccatgttgcccaggcttgtcttgaactcctgagctcaggcgatctgcctgcctcagtctcccaaagtgctggaattacaagcatgagccatgtgcgcagccagaaatcccattttgtactatatggccattttcaacttggccacaccatgtggcattttttccctagcttttcactgttctatgaattttgctgactagatgttttgagctatagtgtagctatagccaggacagggatagagaaaagagagtgagaaaaaatggagggagatgggtgtgaggatggggaaaggaggagaaacaaggggttggggaaggaaaggaaaaagatgctaggaagggagaggtaggggacagaaggagagaggtagaaagggaaggtggcctggaaaggctgtgaaagcaaagaatggtgggagagagaagcccggagaggaggtagaaagggagaagaaaacaaggaagtagacagaaagaggagagggcgccagagggagagagatgcaagaatggaggagggaaggagaaggagagagcaaccaatacaaattatgctgttctcccttctgttctgcaacttcttttttagtcagttaggtaagtttaacaaagtggctactagacaatattttgatttctcatttactttaactcactgagttactgataaaacctgctgattgttccgtttttaaaaatcagatatgtatgctggaacaagttactactacaaaatattgtgactttttctttctttcttctaaacttactgaattccctgatggaaggtagtccttgctgatagggtttcaggctttgagctcttgttgcttgttggacttattaacatatatgtaattgatttttgcttttattttaaggaggtggcaaaaaggaaattaactgaaagtcaaggatgactaaggagggggaagtgtttagtactttatcatgaatattcaattcttgcatttcactgctttgggcatctgttaggtaaggagagaataagtgtactcagtagttactgtagctttttgtgacagtgtgcaggtgcctttataggaagtagaaatgaagcatatgatataattcaaagaactatccactcaataaatcagaaaatcttattagaagatgtggttatttcttatgtgtcaactgagagattgtggcttaatctcagtctttgtttttttagatgtaaaaagaatcttattgagtgctgggatggtggcacacacctgtaatcccaggatgaggcgggaggattacttgagccagaggattgcttgaatccaggagtttgagagcaccctgggcaacatagtgagaccacatctcttaaaaaaaagaaagaacgtttggcaacattattgaaacaagaactactgaattctaggcagaaaagaaataggttggcaagcatttgctgtgatgaaatctgtacatattgatattttcttcattggtaccttagttggtacatttaagtaattacagaaacatcgtagaatttctgtgatactatgtgaaatttgtatttttgcttctaaaatcttttcattccttagggcttctgtatgtaatgtactgttgacttgctgcaaagataatgtgtgtcgtctttgggtagagacatttttaccaaatgattgtttgctatacggaggtgactgcagccattggactgaatcaattaatttaacaaataacttcaagagaaatgcttccagtaaagaacgagttcaaaatgctttagaagtgagtgtttttgttacattacttactacaagttttaaaacctttggtacattgcctttttggtaacacagtaatgttataaaaaaactatatcctaggaaaataattcttagaaaattttcagttctatttggttcaaaaaacatatttttatctagattttgtctggaacacaaaactacctataattatgaagttactcttaggtttactgatgatgataaaaggatgattacatttgacttggctgaagtaacatgaagtaaaatctgagaatgcagagatttaactctgaaaataacttattttttctttcttagagcttgagtagtttgtcctattctgttcttctaccattttatctttagaaaacccaccccacccccagaacttggggtctttacaaattaatattgaaagtaaaagtcaatttttgatttttggacatgctaaaggtagaatagtaatacatttgatcgtagcctaaaggctgagaaacaatagtagaatagtaatacagattcttccaatttttttttttttttttctgagacagattctcactctgtcaaccaggctggagtgcagtggcatgatcttggctcactgtattcctggccttagactcctgagtagctggaattacaggtgtgcatcaccacgcccagctaatttttgtatttttagtagggagagggctttaccatgtttgccagggctggtctcgaactcttgacctcaagtgatctacctgcctcggcctcccaaaggactgggattacaggcataagccatggcgctcggcctattattttcttaatattgaaaacgaagtgattttattttttgtggattttttttttgggtgggggagttgttttgttgttgttttttgagacagagtctctgtctgtcacccaggatggagtgtagtggggcgataccagctcactgcaacctctgcttcccgggttcaagcagtagtccctcctcagcctcccgagtagctgggattacaggtgtgtgccaccacgcctggctaatttttgtatttaaagtggagatggggttttgccatgttggctcaagtaatcctcccacaccggttggtctcgaactcctggcctcaagtgatctgactgccttggcctcccaaagtgctgggatcacaggcgtgagccaccatgcccggccctgaaaacagaagtgattttgaaacaatttatctttgaatgctttgtatgattatgcagcaacaatttttctaatttgaatagtattctgatgcctcagaatataataaattctgtattgattcaacaacgaatagaatggttacatgtagtaatagctgaaagaagttactgaccaggaatctgaagacttgttctaccttttgccctgcctcttcttagctagatgatcttgggttctatatagaccattttatcatatgaaagatgggaataacaatatttgcactgcctgcctcatggcatcaaatgggatgatctctatgaaaatgctttgtaaattatgaaatgttccatgtgcagtggtaatattatttaatactgtgtggtcacaaggagttagctatagacaaaagacagtgtatgtagagatatcagtcacaaacaatagtattgggaaaaaaatttttaacatttgattttaggaaatacattttaagaaaataagcctaataaaaattgcaaaacactgtgtgaggattaagagaacagccaggtactttaagtcataactttattcttcaggattcaaatttgctataccaaaatattgaaaggtgtttttacatataaaatgttaaaaggcgtttttacatataaaacatgtaaaatgttctgagctaggatatatgtaacttctgacaatcattatataacctatacgtgtatgacttttgacaatataggtattagttttgtttctattcacacaggtaaatctgagacattttcgtagaggtcggaggagatcacttgctcttgtagcacatacgggatatctaccacatcagcaggatcctcatcatgttcacaggaacactccactgcatgccaatgcactttgccactttcatattgcagccagcatcaacccagccacaggtaatgaaacattgttcaaaacatgtttctgaaattgaatagattgattttataacaactaagttatacttttagttttcaaataagtaaaatattggaggtgactgtcttagcctatttttcttttttttttctttttttttaatttattatttatttttattgatcattcttgggtgtttcttgcagagggaggtttggcacggtcataggacaatagtggagggaaggtcagcagatcaacaagtgaacaaaggtctctggttttcctaggcagaggaccctgcggccttccgctgtgtttgtgtccctgggtacttgagattagggagtggtgatgactcttaacgagcatgctgccttcaggcatctgtttaacaaagcacatcttgcaccgcccttaatccatttaaccctgagtggacacagcacatgtttcagagagcacagggttgggggtaaggtcacagatcaacaggatcccaaggcagaagaatttttcttagtacagaacaacatgaaaagtctcccatgtctacttctctctacacagacacggcaaccatccgatttctcaatcttttccccacctttccaccctttctgttccacaaaaccgccattgtcatcctggcccgttctcaatgagctgttgggtacacctcccagacggggtggtggccgggcagaggggctcctcacttcccagtaggggtggccgggcagaggcgcccctcacctcctggacggggcggctggccgggcggggggctgaccccccccacctccctcccggacggggcggctggccgggcagagtggctcctcacttcccagtaggggcggccgggcagaggcgcccctcacctcccggacggggcggctggccgggcagggggctgaccccccaacctccctcccggtcggggcggctggccgggcggggggctgacccccccacctccctcccggacggggcggctggccgggcggggggctgacccccccacctccctcccagacggggcggctggccgggcagagtggctcctcacttcccagtaggggcggccgggcagaggcgcccctcacctcccggacggggcggctggctgggcggggggccgaccaccccacctccctcccggacggggcggctggccgggcggggggctgacccccccacctccctcccggagggggcggctggccgggcagaggggctcctcacttcccagtaggggcgaccgggcagaggcgcccctcacctcccggatggggcagctggccgggcggggggctaaccccccccacctccctcccagacggggtggctgccaggcggagatgctcctcacttcccagacggggtggctgccgggcggagaggctcctcacttctcagatggggcggctgccgggcggaggggctcctcacttctctgacgggtcggttgccaggcagagggtctcctcacttctcagacggggcggccgggcagagacgcccttcccctcccagacggggtcgctgccgggcagaggcgctcctcacatcccagacggggcggcggggcagagacgctcctcacttcctagatgtgatggtggccgggaagaggcgctcctcacttactagatgggatggcggccgggcagagatgctcctcactttccagactgggcagccaggcagaggggctcctcacatcccagacgatgggcggccaggcagagacgctccttacttcccagatggggtggcggccgggcagaggctgcaatctcggcactttgggaggccaaggcaggcagctgggaggtggaggttgtagcgagcggagatcacgccactgcactccagcctgggcaccattgagcactgagtgaacaagactccatctgcagtcccggcacctgggaggccgaggctggtggatcactcgtggttaggagctggagaccggcccggccaacacagcgaaatcccgtctccaccaaaaaaatacgaaaaccagtcaggcgtagcggcgcgcgcctgcaatcgcaggcactcggcaggctgaggcaggagaatcaggcagggaggctgcagtgagccgagatggcggcagtacagtccagcttcggctcggcatcagagggagagcgtggaaagagggagaggggagaccgtggaaaggggagagggagaggagggagagggagaggagggagagggagaggagggagagggagagggagaggagggagaggagggggagggagagggagaggagggagagggagaggagggagagggagaggagggagaggaggagaggtagagggagagggagaggcctatttttcattgtagcaagctcactgatttctgtttgtttgccctttaaggccatgacttgacttgtgatttaggatcttgataaggcattgaagttcattattagtttattcaaaaattgatatttgaactgttacttaataaaggttagtactacagatatagtattgtatttttttaatttttattttttataggcatggagtctcactgttttgcccaggctggtgtcaaactcttggcctcaagcaatcttcttgccttggcctcccaaagtgctgggattacaggcgggagccactgtgcctggcctttctttacctttcttttaaaccatagatttgttttggagaaaattgtttacactccttgagttcattctagcctttacagtttagcagacaccaacatgatccaggtttgatttaatgtgatacttaaatttttgcttacttctactaattagggattatttgcagcaactcactggattagtacatcagtgtactcaatttaacattcatatcaaaagtaacaccaaggagctgggcatggtcactcatacctgtaatcccaacactttgggaggctgaggcaggcagatcacctgaggccaggagttcaagaccagcctggctaacatggtaaaaccccgtctctaccaaaaatacaaaaaaaaaaattagccaggtgtggtggcaggcacctgtagtcccagctacttgggaggctggggcaggagaattgcttgaacctggaaggcagaggttgtagtgagccgagattacactactgcactccagcttcctgggtggcagagcgagactccatctcaaaaaaaaaaaaaaaaagtaagaaagaccaaggaacaaatgcttttttagctgtgtgactgtcttgaatgctttccttgagcgtgagaagggaacctcaacttcagtcttaatgctaacaaataagcagtccatcttagaattagctcattaaagaggttgataggtcagtctattaagtaaaaactagttgttgttgatattaagatacatatgttactagttcctttgacattatggtgatgactttttttttttttttttttttgagacagagtcttgctctgtcgccaagctggagtgcagtggtgtaatcaaggctcactgcaacctctgcctctcgggttcaagtgattcttctgcctcagcctcctgagtagctgggattacaggcatgagccaccatgcctggctaatttttgtatttttagtagagatggtgtttcaccatgttggccaggctggtctcgagctcctgacctcctcgtgatctgcctgccttggcctcccaaggtggtgggattacaggcgtgagtcactgcacccaaccaacatttttcttttattgtggatcagtttaaaatttgcttgttaccaaaatttgttataaattaagatacttctattaacagagctacaaattatagacattttatcatgtgaatatttttcactgttaaacatttatggttaaataaattatactgtatgacctaggacatataatttaatctcctttgcaatagatacattaaatttaccgtttaaatctgttactgttaataatagtggcaaacattatgttggaagtcttcttttacatcacaacattgttatgtgaatttttgacagtagaaacaaaaatagagaactacaatatatgaatatagctaaatacagaatggtgacttttttctcttcaagggtaaaaagactttttttctcttctagtgaattagactgcataaatagaaaaagattgattcattagctttacagttttgcctaggaatgatctataaatgcatttccccacctgctgcttacggaaagtataaaaaggaagttaaaggaaagtttccttgttggttactaccataagaaaggtgctatattctattttagcagggccactatatggaaaatatctaaattaaatgttgttacaaaaatgaattactaatgagattctagctaaggagggcactaaatgtggattttgtgtgtgtatatatatatgtaattattattattgttattatttttgagatgaagtctcactctgttgcccaggctgaagtgcaatggtgtgatctcggctcacagcaaactccacctcccgggttcatgccattctcctgcctctgcctcccaagtagctgggactacagacgcccgccaccactcctggctacttttttgtatttttaataaaggcggggtttcaccatgttagcaaggatggtctcaatctcctgacctcgtgatccacccaccttgacctcccaaagcattgggaatacaggcgtgagccaccgcgcctggccaatatatatttaaaaaatccaaaacaaacaaaggttgctataaaaaagctctgtatgtactgtaagcatataggtttttttctttttttcatgtgtgtttttaaacaatggaagagtcaactgtgttagactaaattatgttattgactgggttcgatggctcacatctctaatcccagcactttgggaggccgaggcggtggtgaagtcaggaatttgaaaccagcctggccaacatggtgaaaccccgtctctgctaaaaatacaaaattagccaggcgtggtggtgtctgcctttaatcccagctacttgggaggctgaggcaggagaatcgcttgaacctgggaggcggaggttgtagtgagctgagattgcgccattgccctccaccctgggcagcaagagtgaaactctgtctcaaaaataaaataaggtaaaataaaataaaagcattattgtatgtgctgcattgaatggaacgtttatattataattatcaaaaaagtttgcgtcatagcaatttatcctcattgaaaaccttgcagcatccttttattttggaatatcctctcaacagtcataccaccaggacatgactgtataacaataaaatattctcttgcattaaattggggatatctattcaataaaagacaaaaaagaaaatgtaggaagtgtacttagagctgttactttctaagtgcccaacaccgtggacaattcaagcatcgtaatctctgtaaataacaataacaaaaaaaatttttgtcctgctgttaaaatccatcattatagacaaaactggtgaagattgattagacagattcatctaacactgatgtccaagctggcgttggcaactaatgcataactggtggtcaatagagattttgaaagatcttcactttctattgttcttttccaggggtcttgaagagttctgttctaaaatatgttgttgagttgagcttctcagtttgctttttcattctcaaactggtgacgtttttcctctaattctttgtgctgtgcttaaattcctttttgctcttggcaccgttggagctcagtttcagagtccttcagtttttgaacttttttttttttgaccttcatcttgaacgcctgcttcatctttgtccccatcttcttcattttagctacatgctgtcttctttcctcttccatttgtgccagagggctcttagtaagctgccctttattcttgttgttttcaactccattgtaagtcaggtgccatttttctgcttctgtggttttcgtaatgggcattatcaggaacatctttcaagtcttgtatgtgtgttcctatcaagatactccttagaattgtaaaattacagtgctcaccatattcaacatcagcaacacccttaggatactgccttcctctgactctcttgccattaacttcaatggtagtattattggctaccacagcaagtggtaaacagtcctttatcctttttttttttttttttttgagacagagtctcgctctgtcacccaggcaagcctggtgatagctggttgtccaggatagaattttagttcaactttaaacttaccgaattactcacagaattttacttagtctggtaatctggagtgcagtgaccgatagctcactgcaacttctgcctcctggcttcaagtgattcttgtgactcagcctcccaagtaattgggattacaggcacatgccaccatgcctggctaatttttgtatttttagtagagatggggtttcgtcatgttgaccaggctggtctcgaacccctggcctcaagtgatttgcctgctctggcctcccagagtgctgggattacagacatgagctgctgcacccagccagtcctttatctttttaacaagtttattttcttcatcatgtgtttttggaaattcatatatttaattttatgttcttagatttctttcattatctgtttttaaactattggcatttctctggtatcagcatgtctgctttggcaataagtgggaatgatattcactttttcaagcaaaagcttcataaacttagtatcaaatggtttaagtccatgtcctgaaggagaaatgaagtataaacaaccctgcaccctgttatgaggcatctgacatctgttttatcatgattctccatttaggtggtcctcaatttactatcagtgtagtcagtaaccaacaattactattacccattgcaagtctaaatcatgggatatcaactcttgtgagcagcaactgaacaccaccttctttgattaaaactttgcatagttccacctgcacggtctttttaattctgtgagaagaatctggatactctggagaatacagagtgaagaataatgagttgattaatgtaaagtttctgaatccagatttccccactgccataagtatgaattccaaccctctcttcactgattttctggatatttgatttgggagactggaaaatcccacgtagacttcagggttcttccgttgagctaccatgctgctgttgatgcttctctcctcagcagcagatctcttgctgactgacataccctccccactccatgactagccccagctggaaatcttatttagaggttaaataaaatgtgttccagagatttaaagataaatgaaatattataaatttgttcagacccgtagaatgtacaacaccaagaatgaaccctaaggtaaactgtagacgttgggtgatagtgatgtgtcagtgtagattcatcaattgtaataaatgtaccacttttggtagtggatgttgataatgtgggaggctatgcatatgtaggatggggaatatggctgtacctttgaattttgctgtgaacttaaaaatactctaaaaaatagtatttaaaaaatcttaaaataggccaggcacggtggctcacgtctgtaatcccagcactttgggaggctgaggcaggtagatcacgaggttgggagatcgagaccatcttggccagcgtggtgaaaccctgtctctactgaaaatacaaaaattagctgggcgtggtggcgtgtgcctgtaatcacagctactcgggaggctgaggcaggagaatggcttgaaccagggagtttgcagtaagccaagatcacaccagtgcactccagcctggcaacagagcgaaactctgtctcaaaaaaacaaaatctcaaaataaaattaaaaagtgaaagagaaggactttcaggcaaacaaaatataaatgtaatagtaataaaaatatgaaacatggatgtttcatatgctagaaggtaaaaattttaattttatcttttttttctcttatagacattccacttcttccatctattacatctctgagtctaaatgaaaatgaagagaagaccggaccttttgttgtacactggctaaacaataaagaactgcattttactttgtccatggaagtttttttacagcaacttagaaaaagttttgaacaaccatcttctgaggccagtgtagaagattctaatcaggcagatgtaaaatctgatgaaggtaaactttaagaggaaaggaaaatttaaagttttgctcaaaatagcaaacattttcatattagggtaaaactagctacttgtaataaactttaaagttgcaatgacatgatccaaacatggactagctcatttaataatctaatgtagatatttctgttataggtagctttcttccacatggttatttaaggactgggggttctcattcttctggttttgttagcccttaggactttcctatataaaggactatctgtagactagcagcattggtgttacccaggagcttgttagaatgcatgtctcaaggtccacacagacccaccaaaccagaatctgcaatttaatgaaatttccaggtgatttgtatgtacattaaagtttgagaagcattgaaactaggacattaaatttctctgcctttggccttcagttggtatagagagagagttagagagaaagaaagcatagctatttgtcagctaccttgattgacgcatatcacttacactgtcattcagctggcaagaacattcagctggaattcacagggcccgtgtagttcctgactctgtagcctttatatgctgagaaatggaaagtaagaaactgtggtgtgcagctagccatctctgtgacagtctgtggttcataaatgtgtttggtttttttttttaaagttttgttttaatttgtttaatttttaatttcaagatggtttatgatcattaggtaagaaaaatcaaacaggtacacagatagttatgaagtttccacattgttaagtttgataagtatccttccagtttgattctttgcttatgctcacacaaacatctaaatacagacacttaaaagttgtactgtgggtgtgcatttttatacagaaataatgttctgcactttgtgttttttttttgtttgtttgtttttttttgatggggtcttgctctgtcacccaggctggagtgcagtggcacaatcttggctcactgcagcctccacctcccgggttcaagcaattctcctgcctcagcctcccgagtagctaggattacaggcatccgccaccacacctggctaatttttttatttttagtcaagacagggtttcaccatgttagtcagactggtctcgaactcctgacctcaggtgatccatccacctgggcctcccaaagtgctgggattacaggcgtgagacaccatgctcggcctgtgctttgttttaattcagtcagtaatgggcagtttttcatatcattgtatttaacggctgctgagtattccatgtctaagagaaatgtctaacaggtcttctattgataaacatttaaattaatttaaattgtttttcattattctaggtacaatgacttgtctttttcttttttctgtgagtttttctataatcttgatttctagatggggaatttccagggagtgtagcaatttaaaatatcaataacttctgacaaattgccctccagaaatgttttaccagtttatacttcctctaagtgtatctaaatatatgctttacatccttatcaacattggatgttttcattatattacttttttttttttttgccagttgataacgggacaatggacatcttgttttactttgcattttcttgatgcaaattaagcagaatatcttttattatatttttgcccttctgtggcttgccttttaataccctttatctaatttcctgctgagtttttttttttttcttattgatttgtatatcttgacttactttttaaatctggtaaacagtcaaaacttaaaaaaaatatatctcttcagagaaaggctctatattgctaaccaggaattgggggagggtgaggggactgggatttttgaaagaggaaagaatatacatatttacctgtattgataagttgatacacagtttattttttgttactaaggtgttgaaggaaacctggaaattggcaccataaatgcatttccttgaaatgatttctttaagatgccataccagttacaagtccatacacctagaggataactaatgtagcatactgaggtttggataaacctggtactttagagataaagtacaaattacactcaaataatgtattttaaaaactcagtcccaattttagttccaattccaattccttctttttaccatgagcaaaactgaggtccagaaaagtagtgtgtgttactaaaggttaactgagtggttaaatatagaacatctgcattgagaagccagtttacttattttccagtttaatattaggtcttctaccagtaatccactgactcagtcctgtatggctactgattactcagtgaacttcagtgaccttatattcctggagcaaagttacttttaatgcagagcccatttcttattaatatgaaaactgttatgtttttcatcttgaatccatttataaagatatttgtgtgtgtgtttgtactaattgtattagttttgctaaggcattttatgttcctcacactcaaggcaaagagataaaacataatctgaagaaaaatatatacttcttcaaaataaaaagagtcttcttcattatgcagatctgggcatattgtacaatacttaatggctcaaggggatcaaagtaccagtttgatgctgattcactaaatagaatctcattcatatttgatgactggactgtttgcgggctgtgatagattgaaccattctggtgatatccccagatctcactaaataagaaaaggctctacactagaatatgtgacaattgatctggctataaattatgtctataggctctttattattataaggtggcgaaagaggcccctttcttgagcacatgtttaataaaagtattattgtcatctatagattgctggattgattttgtgttgttataatgaagataaggtgcatataccactgtcagattaagaaagttacataacttggccgggcacagtggctcacgcctgtaatgccagtactttgggaggccgaggcaggtggatcacgaggtcaggagttcaagaccagcttgaccaagatggtgaaaccccgtctctactaaaaagtacaaaaattagccgggcgcagtggcaggcacctgtaatcccagctacttgggaggctgaggcggaattgcttggacccgggcagcagaggttgcagtgagctgagatcacgccactgtactccagctggggcaagagtaagactccgtctcaaaaaaaaaaaaaaaatggagcaagtcccttttctgggttgacaattagtcctatattggcattgctgctggctatgaaactcaccaccaaaggtaaacgattaatttgaactacttggtaggtgttatggtaacaaatgatacttttattttttgaaagtccaagttttctcctttcatctgtgcaagggcaaaagtagataagaaactagatctcaaagtatgctctggagcattatcattaagcattacatttactggtttacttaaagtatattgcaaagaatacggataaagagatgtgtagggtgaggtgtggcggaaggggtacagagcttccatgctctccttaggcatgagatctccatgtgttcagctatccagaagctcggtaattcttaatttatagtaataacctgtttgtatttacttggttcatgaactcttttgcttatagaaactgatgatggtgttgatgatctgaaaataaatcccgaaaagaaggaattaggctgtgataaaatggtaccaaactcaagttttacatcattatcgtcagctgccattgatcatcagattgaagtacttctgtctgaatggagtaaaaatgcagatatgctatttagtattcatcccatggatggttctttgctagtttggcatgtggattggctggatgaataccagcctggtatgtttcgtcaagtacaggtactactgttatttctggagagctacttccttgtttatgtgggtactattttctaatacctctttatataattttatatgttctaacacttgctttcttgattctaggtgtcctttgtttccagaattccagtagctttccccacaggtgatgcaaactctctctgtaaaagcataatgatgtatgcctgtaccaagaatgttgacttggctattcagcaggggaaacaaaaaccttctggcctcacccgttccacatcaatgcttatttcttctggtcacaataaatcatctaatagtttaaaattaagtatttttacgcctaatgttatgatgatatcaaaacatgctgatggttctctgaatcagtggctggtcagttttgccgaggaatctgctttttctactgttctcagtatttcccacaaatccagatattgtggtcatcgttttcatcttaatgatttagcttgccactcagtattaccattattgctgacaacatcacaccataatgcattaaggacaccagatgttgataacccagagcaaccttttgatgctctaaatattgaagaatgctctttgacacaacaaaataaaagcactgttgacgtggcatttcaggatcccagtgcagtttacagtgagcttattctgtggagggttgacccagttgggccattgtctttttctggaggagtttctgagcttgcccggattaattctcttcatgtttctgccttttccaatgtggcatggctgcccactcttatacccagttattgtctgggtaagtattctggtttttattacagtaatttagatttgctgacattatcatcaaagggtgaaattttaatatttgtaaatactttctaggtgcatactgcaactctcctagtgcatgctttgtagccagtgatggacaatatctgagattatatgaagcagttattgatgctaagaaacttttatctgagctttctaaccctgaaatttctgtaagtaatgtcttttaaaacagcttaagtatataatattatgttttcagatagtttatatttattgggcatgttctacaattgtgacctataatttgtaataagcatttgtatctttgttttattttttcacatttgtactcttgtaatgatttaaagctcctttaaaaggaaaccatttctttcactctttgaaagaaagtagagtctcatctcctgtaatatgtttctgtaacacttctttactcatagataaatgaggactactgacagtataatgtagaagttatatcggcccccctgcaattattttataggcaggaggagctggaacaacaggaatagaattttaatcttaaacatgaaaagaaagagcccttagcttggttacagttcagacaagagttctttcagtattgttgtaaggcttttgccttatgacaggccacatttgttctcatacccacctaataacaaccttctaactgcattgtcttgggacatccaacaagcaagcgtttccacttttctggttttggcgatttttcttttggtatccccagaggcagccttcggctgtaccaagctttctatttaggagattcaagccatctccctgactaccaattaatgtatttgttaatgctcggcttacagagttgcataaatgtcagtgatctgttccaatcctgtttttttctgtaagttaattttaatgcataattttgcagaacacaaggttttccaaagcatgtatatagtattacagtagaaatgtatatattttggggggggtcttctatttatcaggcatttttaagtaatgggaatttagatgtgaagaaaacaggtaaaaatttgtatcatagagcttatattcgggtgaagggagataggaagaaaacagataaaaatatattaattaaaaatactatggatagaaacagtgttgcagaagaattaggaattgccaagtaagttgctggtcagggaaaatttcacagaaaaagtactatttgattaaagatctgaaggagatgtgggaactagatacgtagatatttattaaagagaatgtgatttgggaaaacggacagccagttcagagatcccaaggccggagcatgtttggtatgtgataaggtttggctctgtgtcccacccaaatctcatcttgaattatacttcccacgtgttgagggagggacctggtgggaggtgattggatcatgggggcagttctcccatcctgttctcatgatagtgagggagttctcacaagatctgatgatcttaaaagtggcagtttcccctgtgcacgtgccgtctcctgacacctgtgaagaaggtgcttgcttctcctttgccttctgccatgattgtaagtcctgaggcctcctgagccatgtagaattatgaatcaattaaacttatttataaattacccagtctcaggtatttcttcatagagtgtaaaaacagcctactacagataattggtaccaggagtggggcactgctataaggataacccaaaatgtggaagcggtgttggaactgggtaacaggcagaggttggaatagtttggagggctcagaagaagacaggaagatgtgggaaagtttggaacttcctagagacttgttgaatggttttgaccaaaatgctgatagtgatacggacaatgaagtcccggctgaggtagtctctgatggagatgacgaacttactgggatctggagcaaagatcactcatgttaatgctttagcaaagagactggttgcattttggccctgctctagagatctgtggaactttgaacttgagagatgatttaggttatctggcagaagaaatttctaagcagcaaagcattcaagaggtcacctggcttattctgaatgcattcagttatatgtgtttacaaagagatggtttgaaattgaaatttatgttaacttacgtttaaaagggaagcagagcataaaggtttagaaaatatgcagcctgaccatgtggtagaaaagaaaaactcattcctggagaagaattcaagggctacagaaatttgcataagtaaccaggagctgaatgttaatagccaaggcaatggggaaaatgtctctgggacatgtcaaagatcttcatggcagcccctcccatcagaggtccagaggcctaagcgggaaaatggtttcatgggccaggcccagggcccagctgctctgtgcagccttgggattcagtgccctgcctcccagctgctctagctccagccatggctaaaaggggccgtggtacagctgcggctgttgcttcagagagtgcaagccccaagccttggcagctgccacatggtattgggcctgtgggtatgcagaagatgagagttgaggcttggcagcaaccacctagatttcagaggatgtatggaaacacctggatgttcaggcagaggtctgcggcaggggcgaagccctcatggaaaacttctactagggcaatgcagagggagaaagtggagttggagcgtcccacagagtccccactggggcctcatggaactgggagaagaggaccaccatcatcctccagaccccaaaaaggtagatccactgacagtttgcaccatgtgcctggaaaagccataagcactcaacactagcctgtgaaagcagccacaggcactgtaccctgcagagccacaggggcagagtttcccaaggccgtgggaacccacacctgtgtcaatgtgccctggatgcaagacatgtagtcaaaggagattttggagcttaagatttaatgactgcctggccaggtttcagacttgcatggggcttatggcccctttgttttggccagtttcttctatttggaacagaacatttacccaatgcctgtgctcgcattgtatcttggaagtaaccaacttgcttttgattttacaggctcataggcagaagggagttcccttgtctcagatgatactttggacttggacttttgggttaatgctgtaaggagttaagactttggggaactattgggaaggcatgattggttttgaaatgtgaaaaggggatttgggaggggcttgggtggattgatatggtttattgctgtgtgctcacccaaatctcatttcgaattataattgccacatatcaagggaggcacctggtgggaggtgataggaacatggtggccatttcccttatgctgtttgcattatagtgagcaagttctcacaagatctgatggtttaaaaagtgtcagtttcccctgcatgctttctttcctgccaccttgtgaagaaggtgcttgcttctccttcatcttccgccatgattgtaagtttcctgagggctcccctgccatgcagaactgtgagtctgttaaaattacccagtctcaggtatttatttatagcagtatgaaaatggactaatacagtatgtaaaggaacagcaaaaaggccactgtggctggagcagagcatgtgaggtggaaaatagtcagggataaagtcggaaagttagcctggccaggtcatatgaagcctgataggccattgtggtaacttcaggttttactctgaataacatggaaactatagaagaggtatgaaatgatttaggttttaaatgattcctctggtggctatatagattagacgtgggatgcggaagtagatccagagagaccaatttaggaaccaattacagtagtccaggagagggaaaaaaggagcttagaatatagcaagtggtaatggcagagatgataaaaatggccaaattcaagatgttgtttagaacattgaatagctatgaatggactggatgcggtatgtgtgagaaaaaaagaggactcccaaggtttgtgattgaatattaggaagaacagaattgctgtgaattgagatgtggaagaatgtagaagtagcaggttttgaggggcagggaaattcaagagtctggctttggtcatattaattttgagatgcctgtttgacatccaaaagacatagtaggttagtatctggagttcagagagaggtctggcctgaaaatatacagtagttgtcagcatataaatttgaagttgtggaagtgaatgagattgccaagggtgagactatagttagaaaacagaagtgttaagccaggaacgatggctcatgcctgtagtcccagcacttttggaggccgtggcaggtggatcacttgaggtcagaagtttgagaccagcttggccaacatggtgaaaccccatctattaaaaatataaaaattagccagatgtggtggcaggaacctgtagtctcagctacctgggaggctgaggcaggagaatcacttgaaactgggaggcagaggttgcagtgagccaagatgacacgactgcactccagccttgggtgacagagagagacaccatcttaagaagtaatagattgaatgtgtgctcacttcagcagcacataaactgaaattggaataatactgagaagatgagcatggctcctgtgcaaggatgacatgcaaattcatgaagtgttccatatttctccagaagagactggggacctatattcaacatccttaaagaaaaaaaagtcttcaaccaagaatttcatatctagtcaaactaagcttccgaagtgaagaagaaataagatcctttttagataaaccaatgttgagggagtttgccttacaagaggtcttgaagggagtagtaaatattgaatggaaagatcactaccacctaatataaaaacacacttaaatatacacagaccagtaacactataaagcaaccacacaagccagcatagtaaccagctaacaacataataacacaatcagatccacacatgtcagtgctaaccttgaatgtaaacaggcttaatgccccacgtaaaaggtatagagtggcacactggatttaaaaaaacaatggtatgtggtcttcaagagacccctctcacatgtaatgacacccataggctcaaaataaagggatggagaaaaatctaccaagtaaatggaaatcagaaagaagccgggttgccatcctgatttcagacaaagcagactctgaaccaacaaagattagaaaaagacaaagaagggcattacacaatggtaaagggttcaattcaacaagaagacctaactatggtaaatatatatgcaaccaacacaggagcacccagattcataaaacaacttcttagaaacctacaaagagacatagactcccacacaataatagtgggagccttcaacacttcaatgtcagtattagacagctcatcgaggcagaagagtaacagagatattccggacctgaactcaacattggaccaaatgtatctgacagactgctgcagaactctccacccaaaacaacagaatatatattcctctcattgccacgtcacatactctaaattggaccacataattggacataaaacaatcctcagcaaatgcagaagaaccaaaatcataccaaacacactgttggaccacagtgcaataaaaatagaagtcaggatttaaaaaatagcttaaaccagtcaattacatggatattaaaaacatgctcctgaatgacttttgggtaaatagtgaaattaagacagaaaccaagaagttctctgaaagtaatgggaataaagatataacatgccagaatctctgggacacaactaaggcagtgttaagatggaaatttatagtactaaatgcccacatcaaaaagtcagaaagatctcaaactaataacctaacatcactactgaaagaactagagaaggaaaaacaaatcaaccccaaagctagcagaagataagcaataatcaaaatcagagatgaactgaaggaaatcgaaacacaaaataccattcaaaagatcagcaattccaggaaatggctgtttgaaaagattaataagataagtacgttgctaactaagccaatagaaaatccaaataaacccaattagaaattaccaagggaatgttaaccactgactctacagaaataaaaacaataatcagaaactactacgaacacctctgtgcacacagactacaaaacctacaagggatggataaattcctggacatataccccctcctaagactgaaccaggaagaaattgattccctaaacagactaatacgagctccgaaattgagtcagtaataaatagcctaccaaccgaaaaacccaggatctgagggattcatagctgaattacaccagatgcacaaagaagagctggtaccattcctactgaaactattccaaaaaattgaggaggagggactcctccccaactaattttttgaggccagcattatcctgataccaaaacctggcagacacacacacacaaaaagaaaactttagcccaatatcctctatgaatatcaatgcaaaaatccttgacaaaatactggcaagccaaatccagcagcacattaaaaagctagttcacagtgatcaagtaggcttaattcccgggatgcaagttttgttcaacatatgaaaattaaatgtgatttatcacataaggagaactgaagacaaaaaacacataatttttttgatagatgcagaaaaggtttttgataaaattcaacattccttcatgttaaaaactctcaataaactaggtgttgaaggaacatacctcagaataataagagctatctttgacagactctcagccaacatcatactgaatgggcaaaagctggaagcattccccctgaaaactgacacaaggaaaggatgccctgtcttgccactcctattcagcatattattggaagtgctggccacagcaatcaggaaagaggaataaaaggcatctaaataggaagagaggaagtaaaactatcactgtttgtacatgacatgtttctatatctagataaccctatgtcttggcccaaaagctcctagatctgataaacagcttcagtaaagtttcaggatacaaaaattaatgtagaagaaatgactagcattcctatacaccaacaacagctaatctgagaaccaattcaggaagacagtcccattcccaactgccacaaaaagaataaaatacctaggaatacagctatccaggggggtggaagatctctacaatgagaattacaaaacattgctcagataaatcagagaagacacaaacacatgggaaaaacatcctatgttgatggatagaaagaatcaatatcattaaaatgaccatactgcccaaagtatggcccaaaaatttacagattcaatgctattcctatcaaactaccaacaacattgttcacagaactagagaaacctattttaaaagtcatatggaaccaaaataagaggctgtgtagccaaggcaatcgtaaaaaaaagaacagagctttgaggtatcatgttacccgacttcaaactatactgcagggatacagtagccaaaacagcatagtagtggtacaaaaacaggcacattgaccaatggaacacaatagagaatccagatataagaccacacacctacaactgtctgatctttgacaaacctgacaaaaacaagcaatggggaaaggattccattaataaatgatgctggcagaattggctagccatatgtagaaaattgaaactggatcccttccttacatcatatacagaaatcaactcaaaatggattaaagacttaaatgtaaaacctaaaactctaaaaaccctggaagacaatctaggcgataccattctggacataggaatgggcagtgatttcatgacaaagacatcaaaagcaatcataacagagtaaatagacaacctacagaataggagaaaatatttgcaaactatgcatctgagaaaggtctgaatatccaacatctgtaaggaacttaaatttacaagagaaaaacagctccatcaaaaagtgagtaaaggacatgagcacttttcaaaagaagacatacgtgtggcaacaaacatgataaaaagctcaatcactgatcattagagaaatgcagataaaaaccgcaatgtggcaccatctcacaccagtcagaatggctattattaaaaagtaaaaaaaaaaaaaaaaaaaaagatgctgatgaggttgcagtgaaaagggaacacttacacagtgttgatgggagtgtaaattaattcaaccgttgtggaaagcagtactgtgattcctcaaagagctaaaaacaaaactgccttttgacccagcaatcccattactggctatgtacctagaggagtataaatcattctgtggtaagggcacatgcaggcaaatgttcattgcagcattattcacaatagcaaagacatagaatcaacccaaatgcccatgagtgacagattggattaagaaaatgtggtacatacacatgatggaatactgtgcagccataaaaaagaatgaaatgatgtaatttgcaggaacatgggtggagctggcattcataaagcaacttctttatggaggccattctttaaggaggccattatccttagcaaactaacaggaatagaaaaccagatactgcatgttctcacttacaagtgggagctaaataatgagaactcatgaacccaaagaatggaaaaacagacactggggacttcttcatgttggaagttgggaggagggagaggaccagaaaaaataactctcgggtactgggcttagtacctggatgatgaaataatctgtacaacaaagccctgtgacatgagtttagcacacgtactcccaaacctacaatgaaagttaaaaaaaattaaagattgaatgctggaatgctcggttaaaagtagggtggaaatacaagggtgaatgtggtgtataatggaaggcaaaagaaaaaaaatatttcaaggaggaagaaggaatgattaccaagatcagatactgctgataaaggaagtctgataaagatttgaaaatagaccactgaatttagcagtgtgaccttgactaaagcagtcaggacatgaatggctcaagagatcagcatatttgaatagtatgtaatcttgtttctttagctctatccttcctatctcaaaattaatgtttaaaaagcactaattattagaacatttctaggagattgaaatcaatttttcacatttatggatgtaatttttttccttaacagttatcaagcattacttttatttttctctgtaccaactgagctgtaatgctttttcattcgtttgttaattcctataaagactaaagacctagaatttttatagttgaaagggactatatttaggcccacttgaattttattgttatttatctgttatgcttgaaattttgttatttactcttatttgcatatgaattgtttagtaaattataaatttttttaaaaaaaacagaaatatgttggtgaagtctttaacatcgtcagtcaacaatcaacagccaggccaggatgcattattgcattagatcccattaccaaacttgtaagtattaattttgggggggaggtatattaaaaaaaagtttatgaaagcattttgcataaaatctatatattaatgtaatttgaaaatttgctatatatttacaggtagattcagtaattaactcatcacataatagataacatattattgtatattttacttcctagacttcaaactagaaaacaaattatcctcattactatattcacagccaaataaattttcaaactttgactcaaacatattagaaatattatcatattaccattagatttaataaagtggtgttaggttcctcatccatggttattgaaaatcactgaaaagaaaactaggttccaatttgtggctaaataaaaaacattggtggatattatttcttacttataaagactcattgtaatgaaagcaaatcatcttgacctaaatttttatattcatctgtttaatctaatggaggtgccatacgcttacgttctgctgaacttttgacttcttattctgcctttaaatatctcattatgaagtattatttttctggctatttagcattaggtaaataacacataggtcaacttacgttgatatttatttatattcagcatggcagaaaaacccaactgcttcatgtttttgaagaagacttcattttgaataaccttgagaagaaaagccttggcaaagacagcattttatctaatgcaggtaaggaagaattatttatggaatgagaaatactatgtacagtatgttaggcagttaataaagatgaattggtaaaatgctttacattgtctatttgaagtaaaaattggggtaggtttgtttattaaatatttatcataaatatgagtatctttttattcttaaccaggtaataaatacgaacaaaattaaaggggcatcttggttgtatgttttttaaactgcataatagaaatgctttattattaacatatgagagctttttgcatggatggggtcctacccatccatttggatattatggacctcctgccttttgaaaatttataatttaaagaagtagcttaaaacttcaagctagaaggtccttaatttaaaaactaattgtcttaattaatgcttttataataaaagtttttaaaatgttaaactcctctcatcaacactttacatgaaggcacactgagtaaaataaagctacagtctcttggtcatcacttgcgattacagagccaaaccaaactcaaaaatggcattcttgaatatcacaatcttataaatcaattatacagtatgtgcctgttgcacaaagaagttatcaagattcatatgttaaatatcttctccatttgttcagacttttttcttctcttttacatcatgtctttctgccaccttttccatttttcttttatgagaagtactccttagagttctgcacttttatgttgacatctaatttcttaccattgcttttagtcttctatcagttttctctgagttaatgagctgtgcaaatacactttatgtgttttttaaaactctgaacatgttggaagtatgctaaaaatggggattaaagatatcaggcgtaagagataagattatttattgtataaacaaaactatccttttcatattaaaatattaatgaacatgttaatattgttaacaatttaagtctctttaaaacttttaaaagaagttactctcctttgcataataaggttgagtttttctgtgttcttcttgtattctagcatttgcttttttcggattcttcaatttttaatgtattttaattctctttaaggctaagatttttcttaaaatattcaggaaatttttacttttacccaaaaactattatgttcattattagagtttcctagaaaatacctaaggagttaatggtttcatatcttttgctctattatgaagaagaaaaatgttttacaaatattttcattattggagcattttttgttgttagtgaaattatcaaaactaggattgatttctattctgtttacttttgttataatctttatccttttctcttaatttctgtattttggatgcctaacttagaatacattaccaaagttaccttttcatttagtctctcaatacaagatgatttaaaacatttatggttaccttttttaatttttttgctatgcaaatttataaaagggcaaagtctttgtgctctaataatacctgctttctcatgttttacatgttctacgatttattttgtttttataatgtaattttcgtttacctaattgtgcacatagtgaataatagattataatgaagaaaacttggattaaaatctattgttaaaaaggtttttcaggcaataataaatcattgatttttctgatgtattttaaaaagatatgtttattttgagcaactcgtgtgctgtttatgcaatttgggagaagacaaattttcttgaatgatatgttttataatgaaaacttatggtttggccattggataaatatcatgaagtcatccattatagaacttattcatttgaaaaatgtttggcaccaccatttcatcatgatatgttgagttgaagtacatattacatagttcctatctgtttagaaatttcctacttcttatggtttaatctttgtgaacaatttgatgatgatgactgtaaacctatcaattcaaacatgaaatagcatacatattattgtaaaaattttaagttaatacaaattcatgtggtaaaggatttgaatatattttataataccacttgtgtttgaagccttaggtaaaagtttttaatcttctttttttaaagtccaattattttaacttggcatgtttagcaagttgtctcttttacacatagtaacagtgaaaaatatcattaataccaacaggcagctcacctaatggattttctgagaagttctacctaattgtaatagaatgcactcaagacaaccgttcactgttacacatgtggaatttacatctaaagtcaattcctgtctcattaggtgagtcttttgtgtgtgtgtttgtgcaactttaataggtgtaagttaacaaattacacaaaattagataatttgggacatatttcttaaagccattctcattaaatggtgataactgtagattattcaattaattcaaaaagcttttcttattttctttctgtgaagaatcatattaatatgtttactattttatcttttacaaggcagttttggattgtaaaatgtaacaatcgtaatatttatagggttcccctgcctcagtttttggttcttttcttatgttttgtagatgaaaaagtagatacaaaattatccgaagcggtttggcagccagaagaacattattcttcttctccagagaagatcctatctcctttttcacaaaagtatcaggcttgcagagcaaatctccagagtaccagcaggttgactctgttttcagaaatggtttatagccaagaattgcatttaccagaaggagttgagataataagtattaagccatcagcaggtttgtaaattttatgaaaagagactaattttgtaacacatgagtatttaccaggtatttaaaaataggtgctgcaactatctcttaaatccacacagaactagaaatggaaataatatattcaagtaccctaaattgaagacttatagttctcattatgttttcagattactctgacatttatcagccagttctagtcttaaatattgatttctaaaacaaattttctttgtctttttgggaagacaaagggacagtttctggagcggagatggtaactaagttgtactttatttgcagactttgatggtattggcaatagctgcctggagccatgattctgattgtgtggtttctgctatatatttattatccttattccagagcagtggttttcaaagtgtccccaggccagcagcatcagcgtcctggaaacttgttagaaattggccactccatttcttgggccacccagggttactgaatctcagactctgggatggggcccagtggcctggacttacaaacctttaaagtgattcttatgcttgcaaaaggtcaagaaccactgttctggagtatcaagaatactaatcaaaaatacaaattaaggcttatgttttaggaaactaatagtgcatgattactttaagtctaagcaaatgttaagttgtagttaggaatcttctcagcatttgttatggcaaatatacctcaatcatgaagggccctgtaaagtgaccattcagtacttaagtaaacataggccattcacatttatattgaaaaatgtgaaagagaaggagccagtgagtgttgacaaatttaaaaaaatgcattgatacctttaaaattagatttataatgtataaaactagcaaagagctgtgaaacaaattcgggattaactagaattaaattctgcctatgcctaagttgtttgatttaggcccaagatgtttaaccttcaagaattgaagtaaattatctcagagttccctttcaactctaggttttggtgatactttctttttatatacctttctgatgtcattaaaagcctctttcttactattcttgctgcccctttttaacttaaataaatataggctgtctattatgcagtttaaaaaacatacagccaagatgcccctttgattttgttcatatttatagtagttaatacaaaagactaaaatcgtaagtacataaaaacagaagtatttaaccaaatttgacattttgttaacggattatttttattttaggacatctgagttcatcttctatatatcctgcatgcagtgctccttatttattggcaacttcatgttcagatgagaaagtaagattctggagatgcagagtaacagatggagaatctgccacgtcaaagaatggaaaaattgatcttgcatacatttgggaagaatggccattacttattgaagatggacttcagagcaatagtagtataactgtacctggtaggcctgtagaagttagctgtgcacatacaaatcgtttagcagtagcttataagcagcctgcatctaatagtagatcttcccaggactttgtgatgcatgtaagtatttttgaatgtgagtcaacaggaggttcatgttgggtccttgagcagacaattcatttagatgagttaagcacagtattggattctggcattagtgttgatagcaatttagtggcctataataaacaagacatgtatttatctagtaaagagaatatcacatcaaacacaaagcatttagttcacttagattggatgtctagagaagacggttctcatatcctgactgtaggaattggatcaaaactttttatgtatggacccctggctggcaaggtacaagaccaaactggtaaggaaaccctggcatttcctctctgggagagtaccaaagttgtgcccctttctaaatttgtactattacgaagtgtggacctagtttcttctgtagatggctccccaccttttcctgtttctttatcgtgggtccgggatggcatccttgtggtaggaatggactgtgaaatgcatgtgtattgccaatggcaaccatcttctaaacaagaacctgttataacagattcgtacagtgggagcactccatctataacaagtttaataaaacagagtaactccagttctgggttacatcctccaaagaaaactctgactcgatccatgaccagtcttgcacagaaaatctgtggaaagaaaactgcattcgatccttcagtggatatggaagattcaggtctttttgaagcagctcatgtactttccccgactctacctcagtatcatcccttgcagcttttggaactcatggatcttggtaaagttcggagagccaaggccatcttgtcccatcttgttaagtgcattgctggggaagttgtggctctgaatgaagctgaatctaatcatgaacgccgccttaggtctctcacaatcagtgctagtggaagcactaccagagacccccaggcattcaacaaggctgaaaatacagattacacagaaatagattctgttcctccacttcctttatatgccttacttgcagcagatgatgatagctgttactcatctttggagaaatctagtaatgagagtacgttaagtaaatcaaaccaattatctaaagaaagttatgatgagctttttcagactcaacttctaatgactgatactcatatgttagagacagatgaagaaaatacaaagcctagagttattgacctttcacagtacagtccgacttactttggacctgagcatgctcaggttctttctggccacttacttcattctagtttaccaggactcagccggatggagcagatgtctttgatggccttagcagatacaattgcaactacaagcactgatattggagaaagccgagacagaagccaaggtaaaactaaactccgtactgataacatttttacttactttcacagaaaataattttaaataatttttattaaaatgatgccattggctaggcacaggggcttatgcctgtaaattcagctctttgggaggctgaggcaggaggatcacttgaacctaggagtttaagaccagtctgggcaacatagttgagacccccatctctatgaaaacaaaaaaaaattagccagatatggtgcctcatgcctatagtcctagctactcaggaggctgaggtgggatgatgcttgagcccaggaggttgagctggcagtgaactgattgtgccactgcactacagcctggacaatagagcaagaccctgtctcttaaaaaaaaaaataccatgaaggttttttttggaaacatctttgctaccttcacaacagttttaactttttttccccccgagactatcataaacagcaaactcttaatatgcactatttatcctgtaaatcatagtactatgagcgagtgcacaaagactcgttatgctgttcatttttactaattttctgctcaatagtataaaagatccaactgaatctttctgagtttagcaaaatttaacagattcttattaaacaattattttaagtacctaaaaatgtggtttctgggttttttcccctcattttgtaataatccactattaacaattataatttggtttttaaaacattgagttttttttaaattagcattaatgtatgctcctacctagaaaagcataatgtaattaggtcttttcctcacccagagagcatttaaaaaaaaaatactgccaagttatgaacagtttgccataaaatctcaagtaagttctgaaatgaacaaattgagccttgtagaccatatatacgtcagtatccctttgaatgaaacttgaaaggaaaatatagggtaaatttaatataataacaaaatttaaatttaagaaaaattaagttggttatgaatcttgacacttttagagatattactagtagatactatttttgatgtgaatatgttataggtgttttatgtttttagtttttgcttcaaggaaaaaatatcaggccctcccaccatagaactgtttctcccagtgttaacagcagattattggggtggatgtatgattcgaacaaactgtattggttaaagataatactgtacatgtgccacagaaaaggttaaactgttcaaaaatcagtcacattttaatttaaataagatttcagtcagaagaggtcagtttataaagagtatcagattctctttattctctttattatttttccaattgtttatactattttttctgtaatgtaaaattctgtagaaaaagataaatgttagaaaatattttacactgataacttttttcttggtcaggttaagaatgttatatgcctatattgggtgttcttttgcttacaattttttttttaatacattgcttcccctttctcccattgcaggtggagaaactcttgatgaatgtgggttaaaatttcttttggctgttcgactccatacctttcttacaacttcccttccagcctatcgagctcaactccttcaccaaggtgattttgatagtaatctattaaagggaaataaagcgagtagaaaatgagagacttgggagtttttaaacttgtttttacccaaaaatgataatgatgacatatttaacatattttaagtttcctttatttgttaaaatgtttattttgtcataatctttgcttaaaacattggaatttttaatggtaggcaaaaggagttaatgaagaaacatactggagatgttctgtgttatgtttttaaatgcatgatatgttcaaggcaaattagtattgtttcattttctttaatttcttctttagattgtcttttctctccttttttttgacatttatctaaattcagtttttccaccaaacattgaataacatttgtgttataatacattctcaaattttaaatatttcacagagtacagaatattgaaagtgtaaatttacccacacttaaaactactgataaaatatgtatttcagatattagtttagtatatttcatgtattctatatttagtgctgtatttcagatactgttagttctcttactttgaactatcttagactttgaactgtcttagcataacgtaatagattcttattaaacgattattgtaggtaccagaaaataacattgtcttagagagttcaaagtaagagaaatctcacttaagttcacttaaacaaaacagcatgttttttggctcatctcccgggaagttcaagaaatagagctgactttcagcattattggaactataggtttaaaaagtgttattgggactttgcagtttagccttttagcctctgctccttggtctcagtctcttgctcgtaccttatgtctctgtctctttgtttctctcactattttctttttctcattttgcatatagctttgaaaaaagtaaagttgaaaattctaaatcaaattctttttagttttttttttttcttttttgagatagagtcttgctctgtcacccaggctggagtacagtggtgtgatttccgcacactgcaacctccatttcctgggttcaactgattctcctgcctcagcctctcgaatacctgggactacaggcgcacaccaccacgcctggctaatttttgtatttttaatagagatggggtttcaccatattggccaggctagtcttgaactcctgacctcaagcaatccacctgcctcggcctcccaaagtgctgggcattatgggcgtgagccatcttgccaggccaaattctctttaaaatttttagattgtaatttagcacattaaaattgtatgtatttatagggtacaaagtaatgttctgatatatgtatacaaagtggaatgattaagtcaaactaaacatatccatcacctcagatatgtaaaatatttgtggtaagaatatttgaaatgtactctcttagcaatattgaaatatacaatacactattattaaaggtagctaccatgctgtgcagtagatatcaaaaatgtattcctcctaactgaaactttttaccctttgaccaatgtctcccttctcatcctgtccccagccttgggcaaataccgtttattctctgtttctttgatttcaattgtattcgattccacagataagtgagatcatgcaatatttgtctatgactggcttatttcacttactgtaatgttctccaggttcatccatgttgttgcaaatgacaagatttcgttttttaaggctgactggtactccagtgtatatacaggcatactcctttttattgtgttctgctaggttgcattttgcaaatacagcagtttttacaaattgaagctttgtggcaaccgtttgttgagcaagtctttcagcaccgtttttccaacagcatgtgttcacttcatgtctctgtgtctcattttggtaattctcacaatatttcaaactttttctgtcatctgtgatcagtgatctttgttactattataatggttttggagtgccatgaactgcgcctatgtaggacaatgaatttaatcaataaatgttgtgtgtactgtggctacaacactgatcagccattcccctgtatttctccctctgctcagacctccctattcactgagacataacaatatagaaattaggacagtttaacaaccctacaatgtcttctaagtgttcaagtgaaaggaagagctgcatatctctccctttaaatcaaaagctagaaaggactaagcttagtaaggaaggcatgttgaaagccgagataggctgaaagctaagcctcttgtgccaaacagtttaccaaattgtaaatgcaaaggacaaggtccaaaggaaactaaacgttctccattgaacacataaatgataagaaagcaaggtagccttattgcttatgtggagaaagtttgagtggtctagatggatcgaactagccacaagattctcttatgccaaagcctaatccagaacaaggctgtaactcgtcttaatttcatgaaagctgagagaagtgaggaagctgcacaattaaagtttgaagctagcagaggttggtccatgaggtttaaggaaaggagctttctccgtaaactacaagtacaaggtgaagctaggtcttctggataacatgctgaagcttctacgtcattcagcacttgcttcagcatgttttccagaggatctagctaagataatggatgaaggtggctacacaaaaggacagatttttaaagtacatggaacagccttctgttggaagaagatgccatctaggactttcgtagttagagagcagtcagtgcctggcttcaaagaacagactgactcttgttaggggctaatgcagctggtaactaagttgaagccaatgcccatttaccattctgaaaatcctagagtgtttaagaattatgtgaaacctattctgcctgcgctctacacatggaatagcaaagcccaatggcagcacctctgtttatagcataatttactgaatatttgcagcctactattgagaccttctgttgagaagaaagatttcctttcgaaatattgctgttattgacagtgacctgttcacgcaagagctctgatgcaggtgtacaaggagattaatatagtttttatgcctgctaacacaacattcattttgcagtccatgaatcaaagaatgcctccaacttttaagtcttatcatttaagaaatacatttcataaggctatagctgctatagataattattcctctgatggatctggacaaagtaaattgaaaaccactggaaaggcttcaccattctagatgccattggggacatgtgtaattcatgggaggaggtcaaaatatcaacattaacaagagtttggaagaagttgattccagccttcacagatgactttgagaggttcaagacttcagtagaggaagtaattgcagatacggtagaaatagcaggggaactagaattaaaagtagaacctgaatatgtgactgaattgctgcaatctcagggtaaaacttcagcagagccaggcacgatggctcatccctgtaatctcaacactttgggatattgaggtgggaggatcgcttaaggccaggagtttaggatcagcctgggcaacatagacgccatctctgaaaaaaatttaggtaggtttagtgttacgtgcctgtagtcctagctattcagggagctgaataggaatatcacttgagtccaggaggtcaagactgcaacgagctatgatcacaccactgcactccagcctgggcaacaggaggagaccctgtctcaaaaaaaaaaaaaaaaaacaaaacttcagcagatgaggagttgcttcttaaaggatgagcaatgaatgtggtttcttaaggtggaatctattcctggtgaagatgcagtgaacatggttgaaatgacaacaaaggatttagaatagtctgtaaacttagttgatagagcattggcagggtttgagaggactgactccaattttgaaagaagttctaaattctatcaaatagaattacatggtatagagaaatcttacataaaaggaagagtccatctatgtggcacacttcattgttgccttattttaagaaattgctatagccatcccagccttcagtaacctctaccctgatcagtcagcagccggtaacatcaaggcaagattctccatcagcaaaaattatgacttgcttaaggctcaggtgattgttatgttttagcaatgatgtattttttaattaaggtatgtacactcattttagacataacgctattgcacagttaatagaccacagtatgatgtaaccatagcttgtatatgcactgggaaacaaaaaattgtgttactcattttattgcaatatttgctttattgtggtggtctgaaatcgaacccatggtatctccaaggtctgcctatatatacgatattttctttattaatttattgatggatacttaggttgaattgataactaaactattgtgaagaaaacttcacttaacattggagtgcagctatctcttcaacatactgatttcacatcctttgactatatacacataagtgggattggtggatcatgtggtaattttgtttttaaattttttctttttttttttagttaaaatttcttttcttttcttctcttttaataaaacattgtcccagaatatttttagatatttgaggaaccttcataccctcttccataatggctgtactaatttatgttcccattagcagtgtaccaggctccccttttcgccacttctttatgaaaactgtttgtttttttctctttctgataatagacattctagcaggtgtgagttgttatctcattatggctttaatttgcattttcctgatgattatagatatcaagcgcttttttcatttatctgttggacattcatatgtcttcatttgagaaatatctgttcagttcatttatcccctctggtttttttttttttcccccaagagttgagggtcttactctgttgcccaggctggagtcaaactcctggcctcaagccatcctcctgcctcagcctctcaaatagctgggtctacaggtgtgcaccacttgtgcctggcatgcctattttttaattgagttgttttcttgctattgggttacttgagttcttgatatattttggatattaactccttatcagatatacagattgcagatattatttcccaatccacggcttttctcttcactctgctaattgtattctttgctatgcagacattttcagtttgatgtcatcccatttgttcatttttgcttttgttgcccgtccctttggtgtgatatccaaaaaaatcattgcccagactgatgacatgtagttttccctctgtgttttcctctagtagttttacaatgcaggtcttatgcttaagtatttaatccattttgacctatttttgtatatggtgtaagataatggtccaatttcattcttctgcatgtggttatctagttttcccagcaccattttttgaagaaactatcctttcccattgtgtgttcctggcacgtttgacaaaaatcaattgagtataaatgtatgggttgatttccgtgccttctattctgttccattggtctgtttctgtttttacaccagtatcatgctattttggttaccctagctttgtaatatagtttgaaatcaggtagtgtgatgtctctaggtttgttctttcatctcaagtttactttgagtatttggtgtttcttggtattcctaatgaattttagggtttttttcttctatttctgtgaaaaatgacatcagtattttgatagagattgcgttgaatctgtagatcattttggatagtttggacattttaacaaattaaaaatttaacaaattaatttttccaatctgtgaacactggatatcttaccatttatttgtgtcttcaaatttctttcatcaatattttatagtttttattttagagctcttttatctccttggttaaatttttgtttttaatgagatggggtcttgctgtgttgcccaggcttttcttaaactcctgagctcaaatgatcctcccaccctggcctcccaaagtgctaggattacagatgtgagccaccggcctggccgatatatttctaaggttttttttttttttttttaagtagcaatgattaatgagattgttttgtttatttttaaaatcagatcagataatttgttgttactgtatggaaatgccactgctttttgcattttaattttgtatccttcatgtttaatgtagttgtttattagttctaactgtttctttggtggagtcttatgtgttttctgtatgtaagattgtgttgttagcaaacagtgacattttcacttctttatttcctatttggatgcctttttatttctttctcttgtctaaatgctctggcagggacttctagtactatcataattgagtagaagttgtgagagagtgcatccttgtcctctttctgatcttagaggaaaagcttttgaattgtcactgttgggtatgatgtttagctctgggcttgtcatttatggcctttgttgtgttgaggaacattccttctacacctaatttgggagagtttttgtcatgaaaggatgtcgaattttatcagatgctttttttgcatcagttgagaggatcatatggttttgtccttaattttgttaatatgaacagaatgacatcagttaatttgcacatgttgagctaatcttgaacccatggcataattcctacttgatcacagtgggtgatccttttattgtgctgttaatttggtttgctggtattttgtggggggttttacatttgtatttatcagggataatggcctataattttttttaattcattttgcctggcattggcataagggaaatcctggtctcataaaaagaggaacttttctttcctttctgttcttcggaggagttcaagaaggattggtgttagtttttctttaaatgtttagtagaattcaccggtgatgcgatcagattctaggcttttgttttgatgggttgatgggagactttttttttttctttgagacagagtctcgcttctgtcacccaacgctggagtgcagtggtgcaatctcggctcactgcaacttctgcccccgggtttcaggtgattctcctacttcagcctcctgagtagctggggtatttttagtagagacagagtttcaccatgttggcaaggctggtttggaacttctgacctcaagtaatctgcctgccttggcctcccaaaatgctggggttacaggcgtgagacgccatgcccggcctgatgggaaactttgtattactgatttatgtccttactcatcatcaatctgttcagatattttattttttcatatttcagttctggcaggttgtctgtgtctaggaagttatctatttcttctgggttatccaatttgttggcatatatctgcatattaatctcttatgattatttgtggtatcagttgtagtgtctcttcgttaacttctaattttatttttagtctttggtttatttatttattgagatagagtcttgctctgtcgcccaggctggagtgccgtggcgcctcgcagctcactgcgacctgtgcctcgtgggtccaagcgattctcctgcctcaatctctcaagtagctgggattacaggtttgctccaccacacccagctaatttttgtatttttagtagaaacagggttttgccatgttggccaggctggtctcgaactcctggtctcaagtgatctgcctgcctccgtcttctaaagtgctggtattacaggcatgagccactgcgcctagcctttctttttcttaatcttgctaaggagttgtcaattatatttatctttccagaaaactggaaagtgttcaggtttttttcccctgtcatttttctagtttatactttatttatttctcctctgattttcatttcctttcttctgctaactttgggctgagtttcttccaatttttgttccttgatgtataatagtaggttgtttatttgacagagatatatatatatatatggggggaggcactgaatgctgtaattttctctcttagaaatggttttgctgcatcccataaattttagcatattctgtttttgtatttgtttgtctcaagataatttttaatttctcttttggtttcttctttgactcattgttttttcaggagcatgttgtttaatttccacaaattggtgacttttccaagatttctcctgttatttatttctcatttcatactattgtgatcagaaaagatacttcatatgatttacatacacttgaattttttaaaacttgctttgtaatctaacacagtatctattctggggaatattctttgtgtgcacaaaaaagaatgcgtattctcttgctgtttggtagaatgttctgtacatgtcttttaggtacatttggtctaagagactaaacattctgtctggatggtctgtcctttgttgcaagtagggtattgaatccccctattattactgtattgtaatctatctctccctttagtttctttaatatttgttttcgaagtctaagtgcctctgttgttgagtacatatatatttataattattaatatcctctggatgaattgacccctttatcattatgtaacatacttctttgtctcctttcacagtttttgacttaaagtctattttgtctaagtatagctacccctattctatttcggtttctatttgagtaggatttatttaaataagaataaatttattttaattttcctctatatattcaggtagttcactgaactttttaagtggattattccaaatattcgtcagtcatttcatagatctgtttcctttgggttcattattggaaatttattagtttgtttcgagatataatgattccctgattcttcaccattctcgtgtatttgctttggggtctgctcatttgagcaagctatctggccaagatagagcttcactattaaacctagcctctgattatgcgtggttcagcctgaaatgaccccagggaggcagggcttgcagttgggttctctaggtggctaggcccctgcctttaggttctgaggttggatgttgctgctctctaggttctgctgtctggcaagaccactgtcaagaccactggctggtctctgcagtcagtcagacctgctggctgggcactgcgatagcctctaattgggctgggttacaggatgtgttctctggccaggcagtattatcgtttgggttctgaagttgggcagggttgcaggctggccccgaggttaggcagagttgttactccagatggacagattcagaggctatgttttatagaaatgcgtgtttgaagcttgccctcctgcctgaacggaaccttggtgtgaggtctggggctgggccaagcccctgtttggcctcccaggttgggcaggcctgtcttctaaggaaatacacagtgatcggtgtctccctgcctgggtaggacctgggagtggtgtttgaggctgagccaagccactgtttgaactctctggttgggcaggtctagcccctgagctttgctgaaatatgctgaggtagatgtctaccagtctgggcggggctttggggtgggctctgaggctggttgtggaggttggccatttaaggactgaagccaggttgaattttttaccatgcttctggaagcaaccagcttgactttgcaggtaggataggctattggctgttacctctaattggatgctaccactggcaggaacacagagctaccaccaacgtctgcaggctagttgctataaggtctacctcctttctttgtttctacgcaacaccagatgatctagctgtgacattgcccacattgtttcccttgaggtgagaccagcgtgagcttcctgggaaacattttagaacactggggaagctcaatgtctgaccgtggctttctttttccactgtacaaactgtggatctagggaattttcttcttgtaccgcaagcaaatcagctgggatgggaacaggtgatgtgctcaaagtgagactgttactcttacccttctactgcagtttttgtttggttctgtggtcctcgcaggtgtctcagctcattcccaagtttgggggtaaaatggcattttctaatctgtggctagttgctacttaaactctctttgtgcaggggtgtctgtcttttggggcttctataacaaatatcttagactgggtaatttgtaaataggaacaagttatttttcatatttctgcaggctgggaagtccaagatcaagacaccagcagatttggtgtctggtaagggcttgatctctgctccatagttgacaccttcttgctacatccttaaatgatggaactggtaaaaaggactacctatgtctcttgatcccttttataaggatgttaatcccattcacgagggcaatggctagttatctccttaaggctctgcctgttaatgctgttacattgcaggttaagtttcaacatgaaatctgaagggatataaatatgcaaatcatagcaaggaatgaaacctggaacttctattcctgccatcttactgatgtctaaatcagattctttaattatttatgaaaatgtattgaagttgctggagagataacaggaatccaaaaatttgatttagaataatagtccattcacaatgtagggtttttttgttttgtttttacctttcatttattttcaaagtgttccgtatagaaagcatttcacattgcttggcatgggaggtgattccttgcttggcttaggttaaaaatttgaggccatatatctcaaagccacatgctataattaatcatttactttacctagtaatgctaaacaaaatgtattatgaaaagtgaaaatagaagctgagcaataaacatgtgtaggccactgggttgagagaattactgacataaatgatgttgtataaatatacaaatatcttattaatatggtgatatggagtaataattactgtgtgccagattctattctaaattttataactatattatttaattatcaaaactatgttataagatagttccatgattatttgcattttttacatacagagagattgaggcattaagagacaacgtaacttatccaaagattatatgaatatattatgctggtacaaaagcaactgcagtttttgccttttttgatggcagaaaccacctgcaattacttttgtaccaacttaatagtcaacaatagagctggaatttattttttgtttttattttcatttttgagacagagccttactctgttgccgaggctggagtgcagtggcacgatcttgcctcactgccatgtctacctccccagttcaagtgatttttctgcctcagcttcttgagtagctgggattacaggcacataccaccatgcctggctaattgtatggttttgttttgttttgaagacggagtctcactctgttgcccaggctggagtgcagtggcacaatctcggctcactgcaagctctgcctcctgggttcacgccattctcctgcgtcagcctatcgagtagctgggactaccatgcccggctaattttttgtatttttagtagagatagggtttcaccgtgttagccaggatggtctcgatctcctgacctcgtgatccgcccgcctcggcctcccaaagtgctgggattacaggcatgagccagcgcgcccggcctaattgtacgttttttgagtagagacagggtttcaccatgttggccagactggtctcgaacttctgacctcaagtgatccacccacctaggcctcccaaagtgctgggattacagcgtaagccaccgcaccctgctagagctggaatttaacatatgcattatgattctggagtctttgcagtgctattcctaattcatcaacctgaactgcttgcttgatgtttttttttttttttactaattccatggaattacatccacaaaacaaatgttgaccaaacaaaggtgaaaagcagctttgaagacagaaatatatcaacataaaataatgctttaagtgttactcattttttaaaaaggatccgaaatacatcagcacagtggaatttgccataagcattttttcttttcctttcaaaaaaatgctatttttgcaaaacatatatgtgctcattggagtgatacagttatttgaagaaggaaaaacttaaaaaagcccatatttccaatcttaaactgtgagtctcatagaagtttacacatttatattgaaaatatggaacatacatttctgataatcatataagcatatttataattcttataaacatcattttttacatttcttcaggcctgtctacaagtcattttgcttgggcatttcactcagtagcagaagaagaactgctgaacatgttgccagccatgcagaaagatgatcccacttggtctgaactaagagctatgggtgtggggtggtgggtccggaatacccgcatcttacgcaaatgcatagaaaaagtaagtgttttattttggtgtataagtgaattaatattttttggacgtttctttaaatggcatttcatatcttctctgccattactccctcttgtttttgaagcagcaaaaggcttttgaatagtctttacatttcatttataacgtgtttcaaaatatctaaagttttaaaatgtatattctaattcccaagtttttaattgacaaacttgttagtagtatatgtctgatttttacaaaataatatatatgtttagaaaaatttaaaaatagtacagaagaacttgtaatgaaaggcaatagtcctattattctctgtatccattgaagccaccactgtaagtcacttttgttattattttatatatacatgcacatattattcatatacatatttttaaaattttattaaacattcaatggatatgtgccagcctttcatatgaaagaaattacttgttcaaaactgtttctgtgaaattttgatcaatattttttgattataggtagctaaagcagccttttatagaaagaatgatcctttagatgctgccattttttaccttgcaatgaaaaagaaagctgtgatttggggattatataggtaggtaaaaaaaaaaaaaaaaaagggtgcttcaatgtgaaaacctgttcataagaagtaaatgaatgaagtaagatttgttgttcttgttgatgttgattcatgtagattcttagttgttttatatttaaaagagagatttcgtaaggaaaaagccccaagtgtttttcagagtggaagaaacctgatgaggtcagtttaatttgttttcagatttatcaatccagaaacaatattttgcttaagaacttctcattatgctcctataaaacaaaggtaatgtattagtccgttttcatgctgctaataaagacatacccaagactgggcaatttacaaaagaaagaggtttattggacttacagttccacgtggctgggaaggcctcacaatcatggcacaaggtgaaaggcatgtctcacatggcagcagacaagacaaaacagagcttgtgcggggaaactcctgtttgtaaaaccaacaagtctcttgaggcttattcactatcacaagaatagcatggaaaagacttgccccaatgattcagttacctcccactgggtccctcccacagcacttgggaattcaagatgagatttgggtggggacacagccaaaccatatcaggtaactaaaccagaaacttatgcttgggacagggaagaagatgaattaaatggtggagtctggaacaggcatttacctctgcactatgggccagcctaccccacaaaactatctccttcctgtgggccccaccttctttctgagctgaattcacttagaatttttctctctcacttctgagcaagactggtgaacatgattatcataaatagttcatcatttgttttgagtttatttccagatgacccacatgaacagcgacctttgggggaaaaatcacgataacaaatcggttttctaagagacttgatgatttacggttgttttgattcaaggcacattctttagatttttatctcttaggtcattctcagatggcaggggtgaaaagatactgatgagtttcaatggtggcacccaagttaatataaatcaaacattttgcatggatttaaaagtaattttcacagtcctgctaatgtagttttctttgtatttagaaagaaaaattttttgtaatctctgagacttatataacaaatgtttacctaatataatttttactgggaaaagaagcagatacatagtaagttatgaactggcagatgtttctatttagacttagccaaatcttaactttagaaaattgattctgatgtaaagaaaattgtattccaaaattttcacaccattttttttcctttatagagctgaaaaaaacaccaggatgacacagttttttggacacaattttgaggatgagaggtggcgtaaagcagctttaaagaatgctttttctttgctaggcaaacaaagatttgaacattctgcagcattttttcttttagctggttgcctcagagatgcaattgaggtaatgagtgaaatttaaataacaaagtatagcaatgtcatcttttaaagctccttagtgcttaaatttttatttttttaaattcaactttattggaaataacacaaggccaaatatctgaaataactgttaatatttaataaagacatttaaaattttgactgttaacttgaacggtatttatacagaattaagattaaccaaatggtgtttgttagttggtagagataggtaattgatttgactcttgagaatattcaaaaaattaaagggtttgtcctaccagtttaaacatatttgaaccccatatctggctctctattatttgatgaatgttagaaaatccttaactgattatttcttagtaaaccttaaaaaaattatgaatatttaagatacaacatttctgtctcaaattgcccttttgctcagagtttcatacaagtaattcaaaacaaccttttaatatggagactaaagtctccaggggcggatggagaatagtagaggttcaagacagaaataaaataatatagcttaaattgacgtcatttaaattatccattgtttcctcatttagtttaatttttgcacatatatatatatttagtactagaaggtaggtttgcagttattaaatgttgtcaagtagatttgctaaaatctaaaagcaagcagcatatgttttgtttcttatccttctttgctaattttggatatttataagcctttatatttttctagttattagtgagttaacagaatttatcctaaaatgaaacctgctcctgcttatttaaaaacaatatttttttttaaaggtatgtcttgagaaattgaatgacattcagttggctcttgtaatagcaagactctatgagtctgaatttgatacatctgcagcatataaatctattttacgtaaaaaagttttgggaatcgattctcctgtcagtgaactgtgttcattgaacataaatatgcatcatgatccttttcttcggagcatggcatattggattttggaagattatagtggtgctctggaaacattaataaagcaacctatcagagagaatgatggtaagctgcacttctaagatgttaatgattaagaatattattggtaattgctacatgtgcagatcactctattaggtggtaagggtaatacaaacaaattgaattcatggtctttataacagtttttggttggttgtttggtttttttctccagaaagataaatcctttgaaaacaaagaacgttggattttctgtttttacaaaatagatttacataaatattgaacataaatattgtcaacacttgaatataaacattttgaagaaatactgttataaagccagtttttaaatcttaggttgaatttagtgtgtttgtcaatcagttttagaattcttacagtgaaaaatgtgttcagtgtaaaaacaagttgacttaagtgatgtgataagaaaatctttagctagatgaacttttgactgtcttgttatgaactggtagagcttatgtactcttttgagtctgctagtaccttttcttttagaaatcctctttgctaaagctttcttagaggccagtataaaatggaattttttatatagatgcatataaaaatgagatttacttttcagatatgttttcatagattgaattgtgtttggtagctgataaaataggtattatattatttggaatactaattggaaaagggtctagttcatagatttttatgtgctatcatttaatcaggaagtggccttcgccttacttcctaaacctttgagaaagctgtgtgactcatttgtttaagtctcctagccatttaagctaaagattttcaaactagcctctatgtaatgaagggaaaatgtaaatgccttttccagccactttctttttttagtgtttttatttaaaaaaaaaaaaattagacacagtatcttgctttgttgccctggctcatctcaaacacctggcatctagctgtcctcccacctcagcctcccaaagtctggaattacaggcatgagctactgtgcctggccccctttccctttcccttcctctttccttttgtcttgtcttttctcttttctttctttttcttctttcttgaggtggagtctcactctcacccaggctggagtgcagtggggctatctcagctcactgcagcttccacctcccaagctcaagcaatcttcccaccccagcgtcctgagtagcggggaccacaggtgtgtgccaccatgcctagctaatttttttgtatttttgctggagatggggtttcaccatgttgcccagggtggtcttgaactcctgagctcaaagtgctgggattacaggcatgagccaccacacctggccctggcccactttcttatacttaacacatattcatgtaaaaattgtattttgatttgggactagtacatttttacatacttttattatgaattaaacttgtattcttctagaagaaaattgcaaaaaataatagcggcttggaccagaatgattggaatggaggcagagagatgtggttggatttgggatatgattttaagattgattacataggactggatttgataaggagtgtaaaggaattaggagtcaaaggtaactcctggctttttagattgaacaataggtagatgatatggggaagaattgttttagatcatggagctttctctgataaggtgaactttgatcagagaactggttgaaatgagtgagttaatcagtatagatataggtaaagagtggtttgggtcaagggcacactaaataaaaaggccccaaagcaagagtttatacacataagtaaaaatgaaatgtaggcctttggatataggagtttaggttttcagtgtgaagttgggactggagatagagatgatgtccaagttatcagtgtgtagatgttattgaaagtcatggggactatatgaattcaactcagggaatatagatagaaaataagtcagcagttgaaccctaggagactctcagtgttcaaaggtagagaagatgaggaggactagcaaagcagactgaggagaagtgttcagggaagtaggagaaaaagaactaagagtctataactggacgttttaaattatcctagaatattacctgaagagacttgtttcaatgggaaagcatcataatctttgttttcctactttgttagaacatgttcattataaatgtgttgttgtctcttcagtgccatggatcattgtggcctattagtaaaattttgtcaaaagactctttagataaaggtgtcatagtagatagagaaaagacactacaatagaaacacacagttcataacttttcttggctcataaaatgaatttactttcagatcaagttttatcagccagtaatcctacagtttttaatttctacaattatctaagaacacatcctcttttgctgagacgtcattttggatcatctgatacattttccacacatatgagcctaacaggaaaaagtggactggcaggaacaattaatttaagtgaaagacgtttattttttaccactgccagtgctcatttaaaagctggctgcccaatgttggctttggaagtattatcaaagatgcctaaagtcatcaagaaaacaagacctttttatagggcttctagttttctggatactagtaaagactgttctccttcttctccattaaagttggatgcaagggaagataagtcttctgctgttgattggtcacagtcactgataaatggttttggatcttcttcagagggttcctcagagaagcaatcaaactccactctttcttttgactggagccaaccaagtgttgtgtttcaggatgactctttagagttaaaatgggacagtgataatgatgaagaaaatgaggatgtccctatttcaatgaaagaactaaaacctttacagagaaaaacagataaaaagttggatgacataagttctaactacacagaatctttcagcacactagatgaaaatgaccttttaaatccatcagaagatataattgcagttcagttaaaatttagagcatgtttaaagattctcacagtagaacttcgtactttatctactggctatgaaatagatggtggaaaattgcgttaccaactataccactggcttgaaaaagaggtgatagctcttcagaggacttgtgacttttgctcagatgctgaagaactacagtctgcatttggcagaaatgaagatgaatttggattaaatgaggatgctgaagatttgcctcaccaaacaaaagtgaaacaactgagagaaaattttcaggaaaaaagacagtggctcttgaagtatcagtcacttttgagaatgtttcttagttactgcatacttcatggatcccatggtgggggtcttgcatctgtaagaatggaattgattttgcttttgcaagaatctcagcaggtatgtaatttacttgatagtcaaaaatggtacatgtctaaaactgtttttggtgtttcttttttggttttgaatactaagacttgattttctttattacggttgctttagggaaagctcccttttgtgtggtccttcatattatgaattatagagttgtgtatttatagtagttacagacgattcagtatcaggccttatgacctgcttaattcacactccaaagtgttgtctgaatgcctttgtagggtgacagacttcttattgcaagaggatattgtcttattttttttttccctctctgtgcccctaaatgtcttatttttaaatatgattattgaaatgctgacttcttcacatcccttctaactctaagtttctattatgcttttattttttaattgttttgaagtgttttaaagagcccttgatttactgaagtaatggtttgtaactgtaaatagttggttaaccttttatccctctttgtttttaaggaaacatcagaaccactattttctagccctctgtcagagcaaacctcagtgcctctcctctttgcttgtacagccaatgccaaaacagtagttgccaatccattattgcaccttagtaatctgacacatgatattctccatgccataataaactttgattcaccaccccaccctgatatccaaagcaataaagtaagtatgcttggtttcaagcttttacttcatctgtacaatgataaaactacaagataaatattaaggcttttttttaagtaattttaaacatcagactaagcatagcaattgttacattgccaagtttatgttgattcctattaaagaaatcttctggttgtagactggcttatcttactcatgttacttacacccggtagagttcttgaattttttatcacaatgcctagttatttagtctagctgctttaagaaaaataggtacgtatgagtcctttagtagtacatttaaccaaaaagctcattgttttttaaatatagaaacttaatattttaatgtaaaggcactaatatgtaaacgaagttttcccttgttaatactaaagaaatccacattttaaggataatgtgaactatttgcccctgtcatccttctaggataggcagtactttgtgaaccagctacaacagaatcagctgcagtgcttgttaaaagtctggattctcaagttcactccaaacttattcaatcagtttgtgagagtatgtcccaggaatgtatatttttaaagaagttccttgtgtgattctaatgcatgcaactaattatattgttatagttaattgtctaatcaaccaaagcatcctattcatcattactttatctgctgttaatgtcatattttatctttacttttcagacatattgaaatcctttgaagtataactgactttgaccattttcatatatccctagtggtttttgtttttttttaatagtctatcatgtagctctcatccacctcacaggttgtatcacaccaattcgattttctgttttcctgatggtggactgtcctacaattttaccctctttagttaccttaatccttgtaattaaatttcactacttatttttctgtactgctctgtagtataaatgcccatagtgcttattatacagtttggaatttaatttctttcagattgtgctcattttagccaaactatatttcatatttaaaactaattatagcatacctgtggtgtatcagttaccttttgctgcttaagaactgtcctgaggccagtgtggtggttcacgcctctaatcccagcattttgggaggtcgaggcaggcagatcacctgaggccaggaattcaagaccagcctgaccaacatggagaaaccttgtctctactaaaaatacaaaaaattagccaggcgtagtggcacatgcctataatctcaggtgtttgggaggctgaggcaggagaatcacttgaacccaggaggcagaggttgcggtgagccaagatcgcaccattacactccaacctgggcaacaagagcaaaactccgcgcccaccccccgccaaaaaaaaaaaaaaaactgtcctgaaacattagtggcttaaaaagccatcatttattttgcttataattctgtgagttggttcattagttctttggtttgggccagctatactaatgtctggactctctcattcatctttggtcaactggtgggttagtcaggttctagatgatctaagaaggcatcatttacatttctggtggttggcgcatgttgacagcactgacaggagaatctgggtcatatgtatctcatcctccagcaggcaagcctaatatatttgtctggattcaccaaagaaacagaatcagtaggatgtatgtgtgtgtgtgtgtgtgtgtgtgtgtatatatatatgtgtgtgtgtatatatatatatgtgtgtatatatatatgtgtgtgtatatatatatatgtgtgtgtgtatatatatatatatatatataatgagagagagatttattataaggaattgttttatgtggttttggaggctgaaaagtcccaagatctgcagttggcaagttggacacccaggagagctgatggtgtagttccggtccaaatcagaaggcctgagaaccaggagagctataatttaagttcaggtcagaaagtcagcaggctgaagacccaaaaagagctgatgttttagttcaagtctgaagacaggaaaagcaatgacccagctcagtgcagttagatgcgagttactcagcctttttgttctgttcaggtcttgccagttgagtctactcacattacagagcacaatctgctttaatcagtctgattcaaatgtttgtctcatctgaaaacatttcacagacacccagaataatgtttggtcaaatgtctgtgcaccccatggcccagtcacacctagatttttttcaaatggtagtttcaggggttcaagagcagcaagaatagaatttgcaaggctttttgaggtgtagattcggaactcacacttcacttctgttgggtcctcttggtcgaacaagtcaagcccagctcagattcagtgagtggagaagtacgtccaactctctcttgcagaagctgcaaaatactgtgatcatttttgcaagctcccatatatagtttttgtcatcttcaattatataatatcttttaattcatactacgttttattgacatttgaaggaaaaattagcaattagatttgatctgtcattctccatttttatctacaaaatgactggcatacttcacaatcagatgaagaacctggtcttttaatattctagtctggtttgctttcttacctagctgaagtttctccttcatcctcagttctgcctaatgttatggcccttgccatgccatgtttagagtcttctcttccttaaaacaaatgcctgactccactgcctttcagttactgccttttataccttatatcctttctctttctctttcctctagtttcactctcttcaaattgtttttaaggtaactagaatatgtggtagcatattcttcagtgacctgtccgttggtgaactgtcagttatcaggctgtttcttcacattttggttgaggaaaaagcagattgagtgttggagggcttactttaatacatggttcatgctctactggagagctgacatctgttcccctttgctctagaaaaagaaattaggtagcaaatgtgtgttttataatttctgctgaagactttagcgtgttttctttaaattttctgtagtaagactcatgtagataaaaatgagtgttgtagaaaaaaaggaaatagttcatgaaggcaaagaatcaaaaattttttcattcttttaaaaatgctgattatattaggtcttgaaaaaaaatctgcactttaaaaaggttatacttaaagtaattttgtttttgttttccaggtgtatgtaatgcatactttagcagcttcactttctgcttgtatttatcagtgcctttgtggtagtcataactacaggtaactatctttttatgaaatttaagaatgcttacagtaagcaatgaggtttcatattttgtatgttagtggtttagaactatatataacagtcttttaaataatgcaaaaagcatatggttgaggttttgagtactttttgttcatatttgaaatttttatggcagatgaatctcaaacccttattctgtataacttatttagcagcctattactggtcactgccttatgtcagacattgtgattggcactgagaattttaacgcaaataatatgataaagtctatttcttagggccagtctagttagagacaaacatgtgagttgataaatgatatgtatataatatggcatagtactaaaatggtaactataataagacagtagatagtaaaaggctcagggaccacatgggagggagtaacttggaattgagaaaaattttaccaaataattgatgtataggatatttctctgtatttctctttatgttataaagttttactgaaatttatctaggcttcaaaaaaatagtttgttaccctctggggtctttctatatctatctttagttgtttgaagtactctatttcttcaagtattgtctcatctctcttctatctttcctattaaacagatattgcaacttctgggtcatttcttaatgttctttaactttcccctcctatattccatttctttatctctttttgtttcatttcaggagaaattctagcttcattttccaaacacggattcattattcagcaatgtcctgtcttatttagcaagaatttatattttagaaattctgtttttcattttcgggatctcttgttgaatttagtatttgcttctgtttctataacatttcttgattaaaaaaaattattttgagtatggagtactttactgataagttgggtttctcaggtgaagatcttttgttgagtttgttatttcttacatggtgtcagccttccttgttaatttttggttgtctgtccagtttgtgtttttgaattttctgtgggtagccttacttaccactctggttgtatatttcccaaggtaacttcaacttgatttctttaaccctcatccttcaagaattcactttcttattatttaggctttattttcattaacttctttttatctttcctatctatgatttctataggaatgagggagttttttttgttgttactctgccatcttgaaactggaaagtaaagcaagggaaactacaaaggcatcaaaatgttataaccaatgagatttgccaatcataacacatttacaccaataaatgcgctatatttaagtatattcatgtacttaatgtatgatataggaatttctaaaggaaattccttataccattttctgtcagaattatttcatagtttatgtcaagctgcaggtttttttgttcattcatctgttagtcttagctttgcatcttttacttggggaagcttatcctgaattctcaaattgtgtgaaatactcctctgtattgccttgatagcgtcatatgcataggtttcatcttttaagagtagtatgataacattatttgtgttttgttccactattaaattttatggggacagagacattgttattccttatatgcctagtacctgctacagtgcctgatgtagggtaggctagccattatacatgaaagtgagcctaaacggacttcattttcaaccagataactatgtttttaagtcaaatatgtaatcttgctacttgtggtacatagcgatttagttttctcatttgtacttattctgtcccttaaaatgtgttttaatttagaaaatgtgtatatttacacttaaaggatactttgtttttatatagcactagactgtacattatattacttagatgtactagcagtataattaataaacaaaaattgatactcttgaaagtagatctgaaacatgaaaatattatataaaatttatcatagatttaaatattgtttttttctcttagttcatttcagacgaatcagtttactggaatggtatatcagacagtactgcttcctcatcgaccttctttgaaaacaggaagcttagatgaagcattaactcccaatacgtcaccagctcaatggccaggtataatttttatgtatagatcagttttttcttagtcttatttataatcttagataagtagaaagacttttagttttgccacatgataatcattgttaaatactgttagaattgataccagttaagtattcaccactcattctgaattacagttacttaacattagtattcccttgatcattatactaatataactcaaatgttttgtaataccgttttttaaatcattttgcttttgacatactagaaaaacccgtctatgaaaatttatctatgacatcttagtcatgaaagattttaatgtttaatattaaagatttttaatgtttctctcaagtaactcatttgtgcttaactataataaccgctactagtctgtgaatctagggaagaaaatacagtattaactcctgatgcaatacattttttcctgaaattagaaaaatatagttaatttttaaaattttaaaaatttatagtcagtgacagctatgtttgtttgtcgttctaggaataacttgtctaattcgacttttgaattcttctggcgaggaagcccagtcagggcttacagtcttgctctgtgagattctcacagcagtgtatcttagtctcttcatccatggcctggccacacattcaagtaatgagctatttcggattgtggcccatcctctaaatgagaaaatgtggtctgctgtgtttggtggaggtgcacatgttcctagcaaagaacagacacattcaaaaactttacctggtgagtttaaaaaatttttttaggactgaagctttatttatctgagtgatatcattctcaaacgtaattacattttaatttagttatagaaagttctggttagagaccatttgcgaaaagcataaacaaatagtcatacagtgaaaatgcagtattaaagtttctggtgcagtttttaatctttaagatattcctgtaccaataattagaacgatcttatgtaaatttattaaatattttactactgaaactttcatttgttttgaaacacactgtaatattggtttttgttctatcccaaatacggattctttcttctttctttggcaggaaggcactttgctatgcctagcccccaccaggtagtggtattctccatggaatgtgtgggcttttccaaagctctttcagccatcagttctcatagccctcccagtcttgcaggcaagatatgagctttagaaataggcttttatcattcagcttgctttgtgttgttttgaggggttggggtacagtgggacagttttattttgtttggcatttatagaaaattgagaagtttcctttgatcaagccatatttttgatttaaaacaatgattagcagtttagaaaactatctctgctattttattctgcttttaaattctttgttttttatatttctgtcccttagactttaacattttaaagtgtgtaaaaataaaacactgtcagtgctaatcatagaaaatcagactatggcttgaaatgactagaaaaacatttcaaattaggctgctttatgatttgcatattatgattccggccattggagtttttggatttctaagtgttcataataccatgaaaagtaaatattttaaacaattgtatccccgtttaaaaactttctaatgttaaaactgtatttttttcatgtattagcccatgtgtgataatcttagttttccaattatggagggcatgaggagtagctttatttttaatacatagtacttgaaaacttatttcattctatattggtgttgaataaattgaaaatgttaaatgtttttccaaaaaaaaaaaaaaaagccctatgcatacatttgagagaagctcagcaaggttatttatctctttatgagctttcattcacttcttccctgacgtttacactgaacatatgcttgtacatataggtgtatgtgggcttggatatatatgttttgggaggtcaagcagttggtgagggacatgagagaataagaaaagcttgaatttggcttcattatttgggaaaaaaattattgccaaaatctttaccatgattgatgaatattctttgaatgaagctatattaaaaagaatttagaaaagttattaccttgttaaaatatttaaaagttattagtagcaatgttggcatatattatacttttcaaaagcagtttccactaacctgtggccctgcatgactatatagcaaaaaatcatgatggcctagcttctacttcctctccttaattgaaattgtttcttcagttacctagctaggactctcatactttctagtctgggtcctgcctctttcttccatcaagaaaaaacaggcaggaatttctttatgtataatacttaccatgaggcaaattcagtttataactttcagcagagttcaactagctttttctgtaaaaagccaaatatatattttaggttttggagtccatttggtatctcacaactatttagttctgcccttgtagcacaaaggcagccatagaccatttgtaaacagatgagtacagctgtgttctaagaaaacattatttatttgttggattgcaatttgccaacccctgctttacaagtagaagcattttattattggtctatttggaatagaatatttgccttccctgttaaaggaatttcaggttttaagaacaactgaagttaatattttgggagatagagttcactgtgggtctcttaacgtatttgacctaaccacaaattgtacttatggaatagtataagtggcatcagagggataatttgtaatcttccctgccatggcccttagcttcctttagccaatctaggggctaattcagtttttgctgttgtaaaatactgaaaatgtagaatcctaacatgacttctccagaaacctgataccatcctgcctattactcatccacctaccacactttgcttactactttgatggctgttttatctctgtggtccctcccatttgccttaaattaaactcatttacttctcctttttcttcttatgcacatcagatttcatatgcaaatttaccttatttgccaagtttacctttgcttattaaaatattaagtattttgtttttgtaacattccttttctgttttttaaaaagttgtttattgtgctttttgtatagatttttttaaaagactaatttcacatgaaatttgccttggactatatttatacttgagatatctgaattcaattaaggaaaaactttcaaagtctaagggaagtaggatccatagctctgttgagtttaattttaaattaaaaattggcaaattaattttgaccatatttttaatatgttctgagaaaaattcatttgttaagactttgatcttgttgatgtaaaatgttaaaaagggataaattattgctaaggaatgtgcagatatccataaaaaagaaaatgaaaaatacattcttactagccatcaggtctcaatttcatccatttttcctgagcacagatatgtgtaaggaaccatattgaaagtccaggttgatctttgtataaggttggtgcaaaagcaatggcaaaactgcagttacttttgcaccaatcttattaaccactctagttgttggttgtaggcaaaaataccattacataaattattttgggggggccattataagtccgtcataagctgtatcctaccacttatttaaccccaagtaaaaaataaagtgacctaaaattatctgcatctatatgtttaacctcagccaataataaggaatacttaaaacgtattgttcacttagtggtagggctggatatagtcatatccaggttatatggtgctcatctgtccttgagtacccagaaagtattctaaatacaatcatggaagtaactgaaggagtacttaaagaaaacatgaatggtacgatttgtccatttgctaaccagaaaaaaaggaatatattcactgaatgatgaaaactaaaggcctgctggtttcaaagccaagctaatttgaaaaggagcaggagggctggatgtggtggctcacacctgtaatcccagcattttgggaggcctaggtgggcagatcacctgaggtcaggagtttgagaccagcctggccaacaagtgaaacactgtctctacaaaaattagccgggtgtggtggcatgtgcctgtagacccagctactcaggaggctgaggcaggagaatcgcttgaacctgggaggtggaggttgcagtgagctgagattgcgccactgcactccagcctgggcgacagagcgagactccatctcaaaaaagaaaagaaaaggagcaggcagaaagaggaaaggaaagaagcgaagagaaagggaaagaagcgaaggtcctgtggagtacggatccactgaaaactagagagagaaaaatctcagaacagaaaatcaaccaagacaaggaactactagcagcattggctttcaatataaagtaacgttcagaaatctcagtttttttaaggcattattatgttgccctgaaaacttaccgaggcaggacagcaacctgataaattttaggttgtaggtaagcagtcctgtgtgtttggattactgctaatcataatcattgatgtgccaagagtctaattgcattaagtaatgttcaatatacattgttgaccaagggaataaaacagtgtattttagaaaagttgacttgaatccagttaaaattaatgtgtatttaaaattttttatcttttaaatttggccagtgaaagctgacaaatctagaatatttcattttcctgactactcaaacgtgtcaaagcattgtatattgaagatgaaatacgtgcatattgaaatacattgtatattgaagatgaaatacattgtatattgaagatgaaatacccttaaacatgttttctaaaagtgttccataagtttaggtactgtattatgagaggaatttgaaagccatcatttgttttccttgttctgttataaatttggatttaaattttctttgcaatgatggcctcatgaactagattatatttctttctatatatctattatatacttaatgtattcttgtagtaacataatatttaaagataagcttcataactgaaggaaattatagatttttattagactctagtctggcaggtcaaaattcttaacaaaaatgttaatgtacataaattaacttaatcaaattttttttggtgaattccacattatatattaatgaagagtttgatttttctaattaactaaaactgcagtgcaggtatatgttcatggaactctgaattgttttgttatggtcaattttaaagaagagaaccagctaagcaatagcaattttcaaaaaattactttttctgctaacagttagaaatccatacttttgctttttattctgtattataaataaagcagtgtttttaagaattgttattgtgttttgtgatacttgcatttataagaactgtgaattacctctttatcttaataaattcatagtaatgacttttttatgtctccaagttgaggaatggaaatataaaatgaacattttatttgtggtaagcatgtcatatattttttactatgagattgctaatgatattctagacataaagtttatttctgacttattacgctaaaacagatcagaaaatccactttttgctttttcttataaaacttgtgtaaaaacaaaagttctgtattcagtagtcagtgattatcacatgtcattgctaacattcctttagcaaagtaagcaaaacagcaaaatatcttgaccagaaaagacttgagcatattaaaatataaaacaaaataggtgatttaaaatataattgaatatgccaaacatttaactggtggtttattataaggaacttttaaaagactgctgaacttcaaagtaactaattctgtggaagggaatactttccttttcttttctttgtgaggcagagactcgtaccgtcgcccaggctggagtgcagtggcgtgatctcggctcactgcagcctccgcctcccaggttcaagtgattctcccacctcagcctcccaagtagctgggattacaggcgtgcaccaccacacctggctaatttttgtgttttttggtagagacgggctaggctggtctcaatctcctgaccttcagtgatccgcctgccctggcctcctaaagtgcttggattacaagtgtgagccaccacgcctggccaggagtacatttttgttagacttttcattgaagaccatataatataaattttaatttaaagtttaaaaagtgttctattcattcattttacaaatgagtcaggaaggcaaatttttatacaagagtagagaaagcgtagaagataaaagaaactccaagaaatgtgcatgtatagatttttacatgtaattattcttttatttcactgctaaagcctgatgacagtagaagaaactaaccctataagaaatgcaacattcatttatctgacctagactccctcattcaatgttttcttctcttttttttttttgagacagggtcttgctctgtcgcccaggctggaatgcagtggtgtgatcacagctcattttacagccttggcctcttgggctcaagtgatccttccacctcagtgccccaagtagctgggactataggtgcaggccatcattgattagcctagttaattttttaagttttatttttatagagacaaggtctcactatacccaggctggtcttggactcctggactcaagtgatcttcccacctcagcctcccaaattgctgggattacaggtgtgagccaccatgtcctgcttaattcagtatttctgtgtaccttactgagaccaatcatgtgatctctctcttcaacccagttttctaatatttctaagtcctaagtcctgcagcaaaatggcttgaatatattttttccattatagtttttttattatgactaaaaacacatgatataaaatttagcaagtgaaccatttttaagtatatagtttagtagtaagtctatcatgtggtgaaacaaatctctgtaactttttcatcttgcaaatctgaaactatacccattaaacaattcccccacttcatacaatccctggtaatcactattctactctgtttccagggatttgattactttatatacctcatataagtggaattatatagtgttttgtctttttgtgactggcttatttcacctagtgtaatgttcttccatgttgtagcttgcgacagaatttccttcctttttaatgctgaatgttccgttgtgtgtgtatactccattcacattttcaataagtttgttgagtttgggttgaaatcttatatacagaaccgtgttgtggcattcagggtgattgaaaagtaagtactactctagggcagtgacttcaggcttttgaagacattaccttatccataaaacatgcttgaccaaattctcaatatatgtatattgatgtctactactatcgatccagatgttaaacattgacaaaatttagtttcttctccttactttccttcttccccttctttcctctgctttcacctccacctgcccccatctctcctttcttcttgtcccttctcctttccctctacttcttcccctgtcactttctgctcctctacctccttcccttctccttctgccctttccccctatttatcaaaaaataaatctaagtagaagttgtagtattttccttccatattctggtgaatcattttgtacaactaccgtggagactcccttgctctgtggtttggagacaaatcaccactttctattaagatatttattatttcatttttatagatatttatggagccatgttcaagatacggtgtatggtaatgatcctaggaagactttgagggtcagtctttctaaaagctggatagtatcatcttccagactttttttgtttgtttgtttgtttttttgagacagagtctcactttgtcacccaggctggagtgcactggcatgatcctggctcactgcaacctctgcctcccaggttcaggtgattcttgtacctcagcttcccaagcagctgggactacaggtgcacaccacgacacttggctaatttttgtatttttagtagagatgaggttttgccattttggcctggctggtctcaaactcctggtctcacgtggtctgcctgtctcagcctcccaaagtgctgggattacaggcatgatccactgtgcctggccagactttttttttttaatcactaatcttattctttgatgattaagaagtaccttcaattaattgcttctttaatccttttatttttggaatatttgaagtttacttggaaaatcatgttttacatttaattttgaggatttgttttatacttagtgttcacgtacatttgtagttctcaaactttttacctgaagataaaggttaacatatacctcttaggagactgaggacttagactgaattggcttgctgaaagcaagaaataaatttgaaatctgtttgtcttaaacttgcatgacttttatcttttccatatttggggggctcagttagaaggtccagactaatgtgcctcctgaagcttcgtgtatactctggcacactcatgaatagctctgtggatatgggtgccttagattgagaaatagagagtgagacctgctggttactttaagttcagttattttgttgtttgttttgttgttgagacaggttcttgttctgttgcccaggctggagtgcaatggtgtgatctcagctcactgcaacctccacctcctgggctcaagtgatcctcccaagtggctgggactacaggcatgtgccaccatgcccagctaatttttctatttttttgtagagactgggtttcaccatgttgcccaggctggtcttgaactctaagttcagtttttaaagaaatgacatttaaatctacattcagaatattaatttcattgtgctgattttaaatgataaactgaaaagtaaatattaacttaataaccttccccttatattttagttttaatcacagcaatatatgtgtgtggtaacaagtctagcagtacagaagaatttataggaaggaatgttgtcttattcctctgctcctccccttccctatgtgtagcctgttagccatttctccatttctgttttgggttctttggggagttacttttataattcttagaaaaccacagtgcagatattctgagggtgaggaaaggattgttaagggaaggaaggtgtatttgtctgtacagtctactatcttgacatggaagctttgttttaaaaagtacgggaaggggaacatcacacactggggcctgtcgtggggtggggggatgggggagggatagcattaggagatatatctaatgtaaatgacgagttaatgggtgcagcacaccaacatggcacatgtatacttatgtaacaaacctgcacgttgtgcacatgtacgatagaacttaaagtataatttaaaaaaaaaaaagtgcttcctgggaaagcaactgaaacttatttttaaaatttatgtcaggacattattctgtttttcctgtgaatgccttagtttttcttcagccactttgtagcctccctatacctcttaaaattcataaattctatattcaagttgctcttaatttctccctaatactattttctttcttctgttactaataaagtagcggttttcccataatagtagaaccatagggttagtttgcacccaaggaatggcaaacgttcttgatatttgattattagcattttcaaaaacaaccagttgaacacccagcagctatagtttttatcggtgcccctaagcttcacgaccaatctgacccagcaggattcaagcataaaattgccttaagtcttcctacaattggaggacaaagaagagggagtaactaccctattgacaagtcacaggtcatttcttgtttactgggtggcatcgctaaggtctttttagttaaagcatctaaagtaatacacattcattactgtgaaactgccgattttttttcctttggtcctgcttcattaaaagtgttgtttttgttgttgttgtttttgagatgaagtcttgctctgttgcccaggctggagtgcagtggtgcgatcttggctcactgcaacctccccctcccaggttcaagcaattctcctgtctcagcctcccgagtagctgggattacaggcacgtgccaccatgcctggctaatttttgtatttttagtaaaggcagggtttcaccatgttggccaggctggatcctgacctcaggtgatctgcccacctctgcctcccaaagtgctgggattataggcgtaagccaccgcacccagccaaaaagtgttttaataagtggttttatacttcctggtgttgagtctgtaaattttaaacatttcctcccagtgtggttaatattttcatgtcacgtgactggattcacagcttgtagtttcaaatgtttctgtctttaaaaactctcttatattttacttttaaaactatttttatctaccagtgggtcagtaaaagaaaaaaagaaaactatttttatgacatactaatcttggcaaaaatctattaatttaacattgtacgtgtttttttttcagagattgtctatacttcttggttcacatgctttttaataacataaaaacaaaaacagccaggtgcagtggcacaagcctgtagtcccagctactcaggcgtctgaggtgtggatatcccttgagtcaagggattaaatccagcctaggcaacataaggagacctccatctcttaaaaaagacaaaacagtaatgttaaagccaaatgataaattgatatatttatcttaaaacttagcattaagtttttgaaaggtaaaaaaatatctctatagttctcacttttcacttgatgagaagttggtaaactaccgtttaagttttagaatgtgtgttaatgtatgcagcagtaatactggaaacttgattgttggttatcaaatgttagtaagaacaaagaaaaaaatttgcacatttaatctcacagttccttttaaaatcatttgaaagattaagtaataatcatgccactttttagtaatctcttagaatactaatattttattcatctttccctttttctgaaataaccaaattactttgttaaactcagcttgactatagcttgttataatgcatgtgcatgatgtgtctgcaagctgagacgcttcaaacaataaaaccaaattgtattacagcacaagtatttgcattcctttggaaggtgagtaaaatctcatcggagccattaaaggagaatattggtgtgccttaatgtggaattctttgcctgtgtattagatcatgcctttgtctgcaaaatccttgattgtctactgatgatttgcattttgtaactcaaggttgattaaagatttgtataatttttttaatgctaatctctttagtattctgaggtaatatactaaaaaaatactatctaattatagagtgttcacaaaataaaacaacaaaattgcattattttcttctttgtaattccattgactggaaaattctgtctctgagccgtttccgaaagtttgaatcagtttaagtagttatggtgcctgaattttgtttatattttctaatgaaaaatatagttttagatataaggccacatcattaccgaagaatctcagaagggagttgttgcttttaattaacactgacatcccatgataatctttaaaaaaaagcaaagtagaaggatgttggaaatttcctatcgtgttcctagttaaattgtggactgatttatgggcggatattacatccttctatttttcacatacaataggtaagtcagcatttagagagtgagggacaaattgaggaaaaagcagaggttgctagacagaaatgatttttgtcttcctctacttattttcttacctgctgtgtactttcataatctcaatcttatttttttgtgtgtgcttatttgtagttaaccttagctcttatgtaaacacaggtgaaataaatgcaatgaaaatagtacttcagtaacattttattttctttttgttagtttcttcactagttgaagaaggagaaaaacagaacaaacgttttaggccgtcaaaaatgtcttgcagagaatctgccccactgaccccttcctcggcaccagtaagccaggagtcactggcggttaaagaaaagttcatcccacctgagctcagtatctgggactatttcatagctaaggtaattaaaatgctatctagatcaatattttcatagtcaaatagaaatgagaatatcagaaataagtgtcatttttggtgcttccaaatgttttcccactttggtttagaaaattttcattagtatcaggctacattccaaaaatatataccctagaatattttgaccatatttcatatagtttttaaggcagttttttggtaaattatgacatttgcattttaaacaatagcttttgcattttattatatttcttataagataaaagagaatttgcgtaacatcttcatgttaatgtacttgatggtgattaaggaatcaaagtgctctggtcatctattatccatatactcttttttatactacagcagtctctcattattctgaaatccataaatttcaattaccagtgttaagtaacattattccctcaacaacatggttcacatttgttaccacagtgtattaaatatgagtaaacttccctgctagcgcttcattctagaaatcacttcgtaaatgtgcactttttgatcagtgaccaatcatgtcagttcttttaaagtctttcagtgattgattatgtagcacctgttactcagttcatacacagcaaagcatgcagttgttttgcttcatctcctgtgataaatccatatgatagtgtacaaaattggatttgatcaaaagagggaaatggccaactaagatgaaagtgcatccataaaaaaagtgatagtactgagagtgaaattcaagttgaacataaatgaagttagagagaaaatagccaactgtgggtatgttgacagtgctgccatttgaaagactctagatgaacagccagaggaatttagtgaaagtgaacttataaatgtagaaagtagttgtgataaaatgatgaagatgttcagagatagtgactttgccaaaaaactttacgttaaagggattcacaacattgaaaatgcaaagaacagtatgttggaagctgataaaatcttagaaatgtgacagtttgtttaaggcacagaagaaatgcttgcttcatatcctgagttacagagatagaaggcaattgctattcaaactactcttgataaaatgttttatttctttgtattcctaatgttttaattacagtatgttaaaattagtttatttaaaaaaactttttctatacatttatagctaatggtaagagtttttagggttttgacaaatatctttaaaggtcacaaaacatttgtaacttttcccattgattattattgctctgtatagtttatgcgtgcgtggtcatttttgtaggcatgcaatactgtgcaaaacaaggactgcctatataagtatctttcactttttgtgtcatcagccacatccctcacattctcaatttccagacgttctcctgcacaaattgacatctaactgtaactgttctctggtgacacaagtctcccaggcctgctgagctatggcttttatttttctcatatcctaaatgtttaagggtagtgaagggagtttgggtctccttgttcctcactgcccttttttgagtcatttattcattcatatattcaacaaatgtttattaagcacttcatttatctaggaatatctttatttcacctccatattttgaaggagagttttgctggatataggattgttggttagcaaggccttctttagctatcttgtttctgaatctttttgttaaatatttagtgtctgcccttccacccaatcaatatcacaacctcaaagtagttgagatgttaccttccctaattgtttgttactgagatctctgttgcttttgataatgcctgtgggcctagaattttaaagacaatcctgtctggcagggcatcagaactcagtcttcacagccttccctgctgaccctggtggaacacctacaccacagagattggggtgggatgggaacagctcctgaccaagttcttactgttttacccagatcagatcccatagatttttaaaaataaatacttctctatgtgttatatgcatgggtcaaccattgtttgttttctacaattttgttcaattttattgttgctttttggagaaaggacttaccaagctctttactcagctgttccagaagttccactctccctgctgtgtttctttgttggtcttccaaggttttccaacctttttttcaaacttcctgcatctccccttccatcctatcctcactcttaattgatgacctcaccttgtaagtcactgagaaaaataaaatcagacaaaactttttcatcatcccaatttaaagttacagatcaattacatttgctcctgtcttatttcctcctgttataatggagaaagtccttctatcagacaccttttctcgagttttactctgaattgcattctttcttttcttctctactctcccctgtgttttcagttctcttcctctctgttgaatccttcacatcaggacagaaatgtgctttagtatctcccattccaaacccctgctttgaccctgaaactttttccagctgctatcccatttctctgttcccactcacattcagcttttcaaaactagacacatttgctttctactgcctttttcccctttcatacttacttatataactttctgacccagttacacccgttaaaactgatcttgttgagattcacgtgatatccatgtcaaatgtagtggaaacttttaaattattttcttatctgtcttcttagcatcattcaacattcttcactactcccatattgaaatgcttttctctccttttctcttgatgacaatctcttgtagctttttttcttaaacttactatttattccttcataatcttctttcttcatccttcctcttctgtttgacacataaatcttggtcttcatgatttgggcattttatatcgatttttcccaaaaccttccctctcatacccagtctttccattttatgaaattgtatattcacccttatagttgctcaggccaaaaacctaagagtcattcatttttcctcaacttctcttgttctccaaatctatcagcagacctgttggttctttctccaaaatatatcttaaatctactacttgtctctagcttcattactaaccacctatgtccaacctgccaactcctgttttagttactgatgtctccatttctacccttgccgtttagcttttctctcataagagagtgatcgtagtgatatacttagcatataaacctcagtacctgtcttctacgtacaacttattggtggcattcccttacattcctttaccatggcctacaagaccctgtctgagccgtcatttgctattctctccaacctttctcccagcatttttttgcttagcagacttgatcaaactactattttcaaaccaaactctttcccaaactctttctgcattatttttcccctgtctaaaatgcttttcttccctcttattatatggcttgttccttcttgtcatttagttctcgtacttttcaaagaggccttccatggtcagcttatctcaattctccttattctccatttcttttctttgtagcacataatacagtttgtatttagttttctgttatttgcctatttttttccagtaacatgtaaaaagtaaatgagggtggtgattgtatctgtcttaaaaattcttaaatccggtagaattcttgccgcacagtggatacttaataaatttttgctgaatggatgaataaataatggaatagtatcaattgatgtcaaaggcataggatggtaagataatagttacttaactctcttataatgaagtatctgcaaatgagatgaattattactattagactgtatgtttgaatgtattaaattagatatgtggctgctaaatttcatgatttctttattttagccttttctaccctcttctcaaagtagagccgaatatgattcagaggagagtctgggaagtgatgatgatgacaatgatgatgatgatgatgttttagcatcagatttccatctccaggaacattctaattcaaattcatataggtatggtatattttattttaaatttctttttaaaaataatggtgtatataaataatatttttgaaaaaattacatgtgaaattaatagcttgttgactttataacacattataacccagatttctttagttgaaattgttaaattcctttccttaacaataatttctctgttgactttataacacattgtaactcagatttctttagttgaaattgttaaattcctttccttaacaataatttatcacatacctttggttgtccattaatggaccatccgtaatttgcatcattcctcacagatcttgctccaagattataccttgcattttgggctctaacataaacaagttctactgtttttgtctggaaaatatattttcagtagaacactagtactataagatgtcaataggtactatcttcaaaaagtactctgtatgtcatacacatgttctaaatgctcacctctagctccaatactgcgttattcttacattcatgaatgatggaatattatctagtctctattgatatgtttacatctaaaacgtgtatgttttactaaaacatggtatgttaatggtgtgataaaaaatgtgaattttccaaaagaagtaaatatatgagggacattgaagtcattctttatttgaaagttaccatgagatttttacttcctggtttattgaggtttttccccctgctgaatgaattttactttttgaatatataaatcatttaaaagtcaaactgcacaactcaacaacaaaaaggtaaataattaaaaaaatgaacaaagggctgggcatggtggcctatgcctgtaatcccagaacattgggaggccgaggtggtcagatcacttgagcgcaggagttcaagaccagcccaggcaacatggcaaaacccgatctatatttctaaaaaaaaaaattttaatgaacaaaaaacttgaatagacatttctccaaagacgatatgaaaatagccaataagcatatgaaaagatgctcaatatcattaatcattagagaaatgcagatcagtttcccaatgagacaacatctcatatgcattaggatggctaccaaaaaaaaaacaaaaacaaaaacaaaaaaaataacagtgctggcaaggatgaggagaaattggaatctttgtgcacttttggtgggaacgtaaaatcgtgcagcaactgtggaaaacggtatactggttccttaaaaagttaaaaatagaattaccatatgatccagcatttccactatggatatatacctgaaaatattgaaaacagggactgaaacaggtatttgtacttcccatgttcttagcagcattatttacagtaactgaggggaagaaacaatcaagtgtgttttaacagatgaattactaaacaaaatgtgctatgtacgttcaacggagtattattcagccttaggaaggaaattctgacacatgctgcaacatggatataatgctaagtgaaataaatcagtcacagaaagggttatagtatgtgatttcacttacatgaggtacctagaatagtgaaatacataaagaataaaaataaaatagtggttttcaagggctggtggtggggggagaatggggaatgaatttagagtttcagctttgcaagatgaaaggaattctggagttggatggtggtggtggttgcacagcaatgtgaatgtacttaatgcccctgaactataaacttaaaaatggccaaaatggtaaattttatgtttttgtattttaccattaaaaaattactaaaaattcaatcctttaagaaataaatatgttccacttgaaataaaagagaacctgacttttttaaaaatcaaactatataaaaatgtgaaatcacaagttttacttaaacttctctttactctatccaatttcttctgcacatcctctacagctaaccacttttattagcttctggtttatccttctgtttgcaaaaataagcaaaagcatctatctaaatttattccccctgctttcttgcagagagggtggcatactacatacagtgttctgctacctgctttttatttattactacataccgaaactgactccatattaacacttagagatccttcttcattcttccttatggttaccctaatattccataggtcaaaaatagttattcaacaagtactctcctcatggacaattttggttatttctacacttctgctattgtagataaagctgacatgactacctctatgcatatattattttgttttcatagaggggtatgttcaggttgattcctgatagtggaatttgttgagtcaaagggtagtatactcttctaaatccctatagaaatagttaacagatccatcgttgctttatttttagttggtccttgatgcggttggcgatggtgcaattggtgctcaacaatttgaagactttttatcccttcgcaggtcatgatcttgcaggtaataaatagctcaacatgagctaatggtgccattgcttttgacttactactctgttgtttttttttttttttttttggtctggactggggggaaaatttagtgatttcctgttacagaagttagatttcttttaactaaaccaaccatctgtaaatgtatccgtcatactgttaggtgcttgaggatggcaacatccaagaaatcaagggcactgaatgtgatgtgattgactgtcttgagactctatttatactctagccaagtgttgagggattttacaatggagagaaaactaagcaaatgcaaaagctagcaattattaacttcaaaggaggaaaagattgtacaggaaagaaaggggcatgataacatactaagtgattctgctatgaactatagttccctatatatgataaggtaaacacaaaaataccaatttaaccaaagatttttataagacactatcataatgatggacagaggagtttattctcattatgccgtagtagtaaatcagtaggtcatttctaaaattgaaaaattaagtattaagcatgttatttagatatagggaggtaagtagtaggaataactaaaagttgaaactgagatcagtactcaagagtatggatgggcagaactgctaagtgctgagttccatggcaagtattatttaattttaactttatgtattgttttcattttctacagatcttaaagagttatatgccatacagaaattagtctgatacaaattaaagcaggggtgtccaatcttttggcttccctgggccacacaggaagaagaataattgccttgggccacacataaaatacattgatactaacaatagatgatgagctaaaaagaaaaatcacaaaaaatttcataatgttttaagaaagtttatgaatttgtgttgggctttattcaaagctgtctgggccgcatgcagcctgtgggccatgggttggacaagtttgatttaaagcgattaattttccccacatacatattttcataatcttcagatacatttttctggtaatattaaggtcaaaagcagtaatgttgaaatacttacacagatttatggcataccttttgtaatccactgggtttctttgcccacctcaccttgcacatcttccctgccaaagtgtatgttaatatttcatctcagtctttttttttttcctgcatctgctctcccctctctcatttcagtctttcttaaaattgaatatggcattttactgcataagattaatatgagtcaatgttcccattttagagcttccagttagttcacctctttgtcatgcggttctaaaaactcttcaatgttgggaacaagttcttctccgacgacttgaaatccatggtgggccacctcaaaattatatcgcaagtcataccgccgaagagagtttgtctgcaggtcctgcaattcttcgccacaaagctttactggaacctacaaacactcctttcaagtaggttttcttatgaatgctatttgggtttttttgtttgtttgttttttgagatggtgtctcgctctgtcatccgggctggagtgcagtggcacaatctcagctcactgcagcctctgcctcctgggttcaagtgattctcctgcctcagtctcctgagtagctgggattacaggcgcctgccaccacgcctggttaatttttgtatttttagtagagatggggtttcaccatgttggccaggctggtctcaaactcctgacctcaggtgatccacctgcctcggcctcccaaagtgctgggattacaggcgtgagccaccgcacctgccctgaatactgtttttaagataggagttttactttttgtgctgtacattcttgtcataactactcaaccctgccattgtagaataaaagcaaccatagacaacatgtacacaaatatattcagtttttgtccaataaactttatttcttaaaatggtaggtaggctagatttggactgtgagctatagtttattgatgcctgctctagaacgatgcttttcaaaatagctggtcacaaaagtgttaagaggaaagtttatagcactaaacaacaagcagtcaacagattcagcacaattcctgtcaaattaccaacatcattcttaacagaattagaaaaaaattattctaaaatcagatggaaccagtagagagctggaatagccaaagcaatcctcagcaaaaagaacaaggcatcacattacctgacttcaaactgtactacaaagcaacagtaaccaaaacagcatggtactggtacaaaaatagacaaatagaccagtggaacaaaatagagatcccagaaataaactcacatcgtgaggatttgttctacaaattatttcatcactcaggtagtactaagcctggtacccagtagttatttttccttttttggagacaaagtcttgctctattaatcaggctggagtagagtggcacaatcacagctcactgcagcctccacctcctaggcacaaacagtcctcctgtctcaccctcctgaatagctgggatcacaggcacacaccaccatgcccagctaattttttgtattttttgtagagacagggtttcaccttgttactcaggctggtctcaaactcctgtgctcaagcagtccgcctgtcacagccccccaaagtgctgggattttagctgtgagccaccatgcctggcccccagtagttatttttgtgatcctctttctcctccccacttccccctcaagtagaccccactgtctgttgttcccttctttgtgttcatgagttctcaacatttagttcccacttataagtgagaacatacagtgtttggttttctgttcttgtgctagtttgctaaggatagtaacctccagctccatccatgttcccacaaaagatgtgatctcattcttttttatggctacatagtatttcttgtatctgtaccagattttctttatccagtctgtcactgatgagcgtttaggttccatttctttgctattgtgaataatgctgcagcgaacacttgtgtgcatgtgttttttatggtagaatgatttatattaccctaggtatatacccagtaatgggtttgctaggtcaaatgatagttctgtttttagctctttgaggaatcgccatactgctttccacaatgattgaagtaatttacactcccactgacagtgcgtaagtgttcccttttctctgcaaccttcccagcatctgttattttttataaataatctgttatttttaaatgataaccattctgactggtgtgagatggtatctcattgtgcttttgatttgcttttctcaaatgatcagttatattaagcttttttcttaggcttattggcacgtacgtcttcttgtgcaaagtgtctgttcatgtcctttgcccactttttaatggtggtgtttgtttttcttttttaaattggttgaagttcgttatagatgctggatattagacctttatcaggtacatagaaagtattttctcccatttctgtaggttgtctgtttactctgttgatagtttcttttgttttgcagaagctcttaagtttaattagatcctatttgtcaatttttgcttttgttgaaattccttttggggtccttgtcataaaatctttgcctgttcctgtgtccggggtggtattgcctaggttgtttgctaaaatttttgtagcttttggttttacatgtaagtctttaatccatcttgagttgatttttgtgtatgttgcaaggaaggcattcagtttcaatcttctgcatttggctagccggttatcccagcaccatttatagaatagggagtcttttcttgattgcttgtttttgtcagctttgtcaaagatcagatggccagaggcgtgtcaccttacttcccagttctctattctgttccagtggtcaatgtgcctgtttttgtaccaatactgttctgttttggttactgtgtttttgtagcatacatcgaaatcaggtaatgtgattccagttttgttctttttgcttaggatcgccttgctattcaggctctttttacgttccatattaattttaaaataggtttctctagttctgtgaagaatgttggtggtggtttgttaggaatagcattgaatctgtaaattgctttgggcaatatggccagtttaatgatattgattcttcttctccatgaacatgggatgttttttccatttgtttgtgtcttatctgatttctttgcacagtgttttgtaattattgtagagatctttcacctcctggttagctgtattcctaggtattttattctttttgtggcagttgtgaatggggctgccttcctgatttggctctcagcttagctgttgttggtgtataggaatgctagtgatttcttgtacactgatttttgtatcctgaaactttgctaagttgtttatcagatctaggagcttttgggctgagacatggggttttctagatatagaatcatgttatctacaaacaggcatagttttacttcctctcttcctatgtggatgccttttatttcttcctctttcctgcttgctctggccaggactttcaatactaggttgaataggagtggtgagacaaagcatccttgtcttgtgttggttttcaaggagaaagcttcctgcttttgcccattcagtatgatgttggctgtgggtttgtcatagatggctcttactattttgaagtatgttctttcaatacctagcttattgagagtttttacatggattgatgttgaattttatcaaaagccttttcttcatctattgatataattatgtggtttttgtctttagttctgtttatgtgattcatcacatttgttgatttgcatatgttgaaccaaacttgcatcctgggaatgaagcctacttgatcatggtgaattagctttttgatgtgctgctgggtttggtttgcaagtattttgttgaggatttttgtgttgacattcatcaaggatattggcttgaagttttgttttttttgttgttacttctgccaggttttggtatcaggataatgttgacttcatagaattaggtgtgaaggagttccacctcctcagttttttggtatagttttagtatgaatggtaccagcttttctttgtacatttcgtagaatttggctgcgaatccatctggttctatgccttttttggttggtatgctattcattactgattgaatttcagagctcattattagtttggtcagggaatcatttcttccaggttcagtcttgggagggtgtatgtgtccaggaatttatccatctcttgtaggttttgtagtctgtgtgcatagaggtgtccatagtagtttctgatggttatttttatttctgtggggtcagtggtaacatctccttggtcatttctaattgtgtttatttgtatcttctctcttttcttttttattagtctagctggcagtctgtctgtcttactaattttttcaaaagaccaactcctggattcgttgatcttttgaatggttttgtgtgtctcaatttctttcatttcagctttgatatttgttattttttatcttctgctagctttggggtttatttgttcttgcttctctgatattttccattatgatgttaggttgttaatttgagatctttctaacttttgatgtggacatttagtgctgtgaatttccctcttaatgctgccttagctatgtcccagagattttgctaaagcatacctacttttgttagatcctatggccctaggttagggatcaacaaactatggccatccccacaggtgaaatccagacctctccatgcttctttaaataaagttttattggattatagccataaatcctctcaattgcatattgccagtagttgctttcccactgcaagttgacagtccctaattcaaatctgaaatgctccaaaattcaaaattttttgagtaccaacatgatgctataagtagaaaatgccacatataactatttaacacaaactttgtttcatgcacacaattattaaaaatataatttctcaccttcactgcctgtaatgccagcactttggaaggccgaagtgggtggatcacctgaggtcaggagttcaagaccagcctgccaacatggtgaaaccctgtctctactaaaaatacaaaaattagctgggcatggtggcaggtgcctgtaatcccagctactcgggaggctgaggcaggagaatcgcttgaacccaggaggtggaggttgcagtgagccaagatcgccctgttgcactccagtctgggccaaagattgagattccatctcaaaaatatacatacatatatatatatatatatttttatatatatatatatatatatttatatatttttatatatatataatttcttaccttcaggttatgcatataagatgtatatgaaacataaatgaatttttaatttagacatatatattcaaatatttcaaaatctgaaaacatatgaaattcaaaatacttctggtcccaagtactttagttaagggatactttacctgtacattatcagacttgagtagttgtgacagagaccatatggtccacaaagcctgaattatgtactaatcctttaaggaaatcctttaaggaaaaggttggccatatgatctgcctccagtcatacagtctgattgcagttaatttattataatttatatggcaccaaggaattgttatcaagttagtcagaaatttctgaagtttatcattaaatttgctgtctctctctgtagatccaaacaccatctggcactgtctgtgaagaggctttggcagtatttggtgaagcaggaagaaattcaggaaacctttatcaaaaatatattcacaaagaaacggtgtctaaatgaggtctgtataagttaaaacctgtttactattttattattgaagtcttttatattatcatgtaaccattaaaatgagttgtattttacagattttttgaaaacacgtatcataaacataggcaattaatgcttagaacagtgtaatttataaaaggggcagtattttcataaatcaatttaattaattcaaatgtatttgggacttttttctcgataaaaatgtttaatattccgcatcttgttttgaattgtcatgatcatcaatttaagagacaagatagaaattttctatgattttcatgtgacagttaaaagaagtctatcttagaagtttaattgtaacttagaagtttaattgtatactgaaaattttttatttatttatttatttattttttctttggagatggagtcttgttctgtcacccaggctggagtgcagtggtgcgatctcagcttactgcaagctccgcacctcccaggttcacaccattctcctgcctcagcctcccgagtagctgggactacaggtgcccgccaccacgcccaactaattttttgtatttttagtagagacggggtttcactgtgttagccaggatggtctcgatctcctgacctggtgatccacccgcctcagcctcccaaagtgctaggattacaggtgtgaaccaccacgcccggcctgaaaaatttttattgtatttatttatcttttttgagatggagtctcactctgtcacacaggttggagtacagtggcaccatttcagctcactgcaacctctgcctcccaggctcaagcgatcctcccacctcagcctccctagcagctgggactgcagatgaacgccaccatgcctggctaattttttgtatttttggtagagactgggtttcaccatattgcccagggtggtcttgaattcctgagcccaggcgatctacctgccttggcctcccaaagtgctgagattacaggcttgagccactgcacccagccaactttttaaatatgtacattttcttttctgtggattatgcttaaattaatgaaattttacaaacccaaattaacctgtagtgtaactggttgcttataccttgatattatcataatgggtttttttttttttttgtcatttagtttagtgctagtaataaatatcagtctgatgatatggggaacttgtttctttcattgggtaagttttgttactaaaaagttcaggtgaactgaacagtagatgcagtgatgtagtcaattctttttgtctcctggactggtaacgaagagttcagaactgacatttggtatgtgaaccacattttgagtagcattgaactagtctgaaagcaagctttgtacagtttttgaagttggaggaaacactgaagatatttcagttgaagaaataaattgaatggcttcacaatagacaagtaagcaaaaagcaagattgacatctaacctttctaccttaaaggaaaattacatatatatctcattgtctctcaatttaagcaccaattttaagtggaaactgtatatgctgttatttactatttgcctcattttgtaaatatattcaaatcgaccaagtcaggaaatagtatgtagtgttcttgctgacttagaagacttttgacctgagtaccttggtgtaatattgaaatttagacaaacatgaatgtatttcatttgtttatttgatctttttttaaaaaaattgacatatttgattaatcttagaaaaatcttatttttctactgccgatatatttgggtatttgggaaatgaagtagttctgaaaacaatacaaaaaaactattgagccattagattgtctagttgattcaggaatagactcattaaagaaatagagtagtatagtcaagccagagtacgtaaacatagcaaataataagtataactacacattttaaaatttctgttattctttggagtttcatgatatctcaagaaaattttaaaattatttttattgtaattattttaatcaggagcatgaatatgaatgttggactaacagttttgtgactatcagtaagctgaatattttctctgaattttgtttttttaatgcacaatgactataatagcccttactttgcaatgttttgataaatagatttaacttatttaaaccttgacacaattaatggtagttattaaaagtttgttgttattgctttgttgttttattcttgatagtgatactcttaaaatagtgtctttttgatagagaatatgaaaagaaaaatgttacatagtaaagcatagatttgaatggaattaaatagaatatagagtttgtgtgaaattaatctttaccggaaaggttactagcctatttttagtattaacaaaatcaccttccatctcttatttttctaaaatgatgattatgcttaaatattttagtcaaagtcactgtgattttccagatggttaggagatacatatatgacaggccctgtattttggatggcaggtgatgggagagtattctgagaactgctctttctttatttctttatgtgtttgaaaatgaaattttacagtttcttcatctgaccctaaaatcctggttttctcagatcttttcttttcctgtttggtaaagtttactggtacctgtgttttaaaatagaatgtcctccctttgtatttaaatagaaagtacagacaactgcaattagattaagtcattcttaataaaaaattgggacttgacaactcccatcattgttcccaattcctttttctgtttttttttgttttgttttgtttgagtttctgagaagaactaaaagtcttggaacaactctttctttaacaagtactactattcccttttaagaagtgtatgtgcttcccagcaatttattgactatttctggcttcatcagtggaagagaattagatacatgtagaaattgaaattttctaatcaagagattttcctgaaggttcagatgtggagataagacaaagcagcgagtaagagaataattcgactttgttcatagtactctgacaccagtagctctgattattttaatataaagtattttggtttcaatcgtgctttaatgtcaacatttcgaaattgagtaaaaacttcttagggttagaataaaatttatagtggtagttaatgagttctgagggattaagttttgctcatttcctaaccatgcaccctcacacatgcttcttataaggtgtatgaaattttgagaatagtaactccatataatgttcttttctagtaaatttggtttaaaatatagcattgaaacaatccccagtattttgcatgttacatctcatctttactctttgtcatgtggttattctttcttgatgaagtcattagaggacaacagtgaaaccatcaaaaattctatgatggaggagccaaacatcaataaggtacaaaatatcattcaactgaaattaaaaattgcattctttcacaaaagaacaaagcatttgcattttacttttaaactggtctttgtttccaatggatttaaagtattgttccctcaaattattctccttttattttaacaacttaaatactgcagttgtaaaagtggtttctgttttgttagataagagaatgcaattttaaagggagttgaatgtatcttgttttggctacaaatttttctgagtaaatacaactaaagttcttaatacatgtgattacaatagcaattgtctagtagtattgttttaattctgcaaatatcacttctgaagttaaaattcaaattaggaattaatgatactaaaattaggaattaatgatattaaaattaatgatattaaaaaattcaaattaggaattaatattaattcctaaaaatatagtaaatactgttacatagcatttattttactggtagcaatagcatgtagcaaagtgccttaagaggatacatagtaagtactcatggtacttgagaaccaaagcacaaaagatgagaatctgtataattatgaaaaaactcctaggcgtcctgtgattgcatattcaactatgactatattttattttatttttgagacggagtttcgctcttttgcccaggctggagtgaagtgtcacagtcttggttcagtgcaacctctgccccccaggttcaagcgattctcctgcctcaacctccctagtagctgggattataggcgcccaccaccacacctggctaattctttttgtatttttagtagagatgaggttttgccatgttggccaggctgatgtcaaactcctgacctcaggtgatccacctgccttggcctcccaaagtgctaggattacaggcgtgagccaccgcgcctggccaattcaactacgactttatgaggttaatatttaactcatgtttttcatattctatatttaaaacaatctcagcagtgatttttaagtgaaaaattgctcaaaaaaatttttaaggttactaatttctaccccttattctttccaatgggaatcctttggtaaaataggagaaataattctgtgcaattaattaaaaagcctgatttgatatcaggtgtatattataactaaaacttttgcaaaataagtctgtatgtcattcatactttcaaactatctagtggcctttgggggttttgagggaatataattcaaacttttaatcagttaacaattttccttgcctgggttttgatgattacttattactgtctacacattatcaggaatttttttttttttttttttggaaacagagtttcactcaggtttcccagactggagtgcagtggcgcgatctcagcttactgcaagctccgcctcccgggttcaagcgattctcctgcctcagcctcccgagtagctgggattacacgcatgggccaccacatccagccaatttttgtatttttaatagagacagggtttctccatgttggtccggctggtcttgaactcccaacgtcaggtgatctgcctgccttggcctcccaaagtgctgggattacaggtgtgagacaccgtgcccagccacatatcaggaattcttatacaaacatttttgttttgatgctgtttataaaatgctaataatcataatgttgtatttctatagtcagcttcatgctacgtcaaaatacagtctttttgaggggagggttaacatcattttggccagcatttttccaagcccactgctatatagtttaaaaaaaaaatctttgtaaggtatgcctgacctaaaataactacatatatttaaagtgtacaacttgttcaattttggcatgtatatacactagcgaagccatcaccacaaccaggataatgattatatccatcagtccccagaatttaatccctccatttttttttctctcccacctgtgccctcttccccaggcagctaccaaactttttcctggtgttaaagattcatttgttgttttctggaattttatgtaaatagaatcatataatacatcatttttggtttatagtctgtgtccattgacttagcataattatttcaagattcatctatgttgtgtgttttagtagttcattcttgttattttgatgcttattacattatatggatataccatagtttatttacctgttaatgaacacttgagctgattttattttggacctattccaaataagactgctttgaatattcatgcaaaagtcacattttatggaaaaatgctttcatttctcttgtgtaaatgcctaggagtagaaagactggatcatgtgtaggtatatgttaaacgttttgtgaaactattcaaatattttccaaggtggttgtaccatttatgtatattctcaatggattgtgtacgaaatcccattctattttttttttttttttttaaaaggcagggtctcactgtgtctcccaggctgggtgtagtggtgtgattgcggctcactgcagccttgacctcctgggctcaagcagttctcttgcctcagccttctgagcagctgggactacaggcatgcatcaccatgcccagctcaattttattttttgtagagatggggtttctccatgttgctcaggctggtctcaaacttctgggctcaagcagtcttcccacctcagcctcctgaagtgttcggattacaggtgtgacccaccatgcccagccttgcatcacattcttaccaacagttggtgtgtagtctatattttcattttaaccattctagtaggtatgtagtagtagttcattgtggttttaatttgcatcaagcatcttatcacatgcttatttgccatttgtctatctttctgcatgaattgccttcaaatcttatgtttattttgtattaggttgcttgttttcttgattcaattttaacagttatttgtatgttctggataaaagtaatttatcagaaatgtgatttgcaaatattttctcttactctatggcttgtcttttcattctgtttacaaggtgttttcattttatttatttattttttaagcaaagtcttgctctgttgcctatgctggagtgcagtggtatgatcttggctcactgcaatctccacctcctgggtacaagcgattctcatacctcaggtgtgcactaacacacccggctaatttttatatttttagtagatgagtagactgggtttcaccatgttacccaggctggtctcaaactcctgggctcaagtgatctgcccacctcggcctcctaaagtgctgggattaggagcgtgaaccaccgcagccggccacaagttcttttgaagtgcagaagttcttaattttgatgatgtctaatgtattagttctggttattcattttcttttgggtgttgtatttaagaaatctttgcctaacctaagatcacaaaaactttctcctgttctaagtgtttttgagtttcagtattacatttaggtctaatccatttcaagttaatttgtttacatggtgtgaagtatagacctcagttctttgttactgttgttgtttttgcatctgtatgtcaattgttacagcattatttcttgaaaagattatcttttctttcactaaactacctctttcaccttttcaaaaatcagttgacacagatgagtaggtctaattctggagtctgttttgggccattgatccatctttatggtaatagctcactgtctttatcactataaccttataataaatcatgaagtcatgtattgtaagtcattcaaatatattattcttctaagttcttttttcttttttctttcgtttttttttttttttttttgccttatcactctgacttagaacttccagtccaatgttgaatagaagtgatcaccagcagacattattatcttgtttctgatcttggggaaagcagtcttttattattaagtataatgttttctttaagtttgttgtagatgccctttataagtttgaggacgtttctttgcattcctactttgttaagagttttcataaggaaaggatgttggattttatcaaatgattttttttttttttttgcctactattgaaatgatcatccttttttcttttttagtatgataggttaaggatttttttaaaaaatgttaaaccaatctagcattcccagcataagctatacttggtcgtgatgtgttatcctttttatatatagttacatttgataaaattttaagaatttttacatctatgttcatgagggatattggtttgtagttttcttacaatgttgtttgtgttggtctcagattagtgctagactcttagaatgaattgacgaaggttctgtcctctttaattttggggaataatttttatagaattagtgttatttctgaagtgtttggtagaatcctgaagttttttaaatgacaaatttaatttctttaacagatgtagggcaattcaggtttatctatttcttaagtcagttttggtagtacatgtctttcaagaagtgtacatttcatttatgttgtcaaacttactggcataaagttatcatgttgccctattaaaatatgtgtagaatccatggtgatgctgcctctccttcttctgctatgactttgaaaaccaaattatgtcttctttagtatttatattccctaatatttggggtattgacaccattttatgttcacctgattgcttcctattttctttcagttatgccttcggcattctttagatatcattttacttcatatttgtgtcattagagtggcaatgaagtgttccaagtacacaaccttatattgtaggttttagtaaatgaaaatcactactgactacccagggtctcagtcactttttccatggatctgctgtatgacctttcacttcttccactcttggagcctcatttactgacatgtaaaattagggctgataattttaaacctgttgcttctctaattgaaatattccgtaggatcctggtgttaatctattgtaactatctctttctcctccagcttctaagggcagctctgtggaacccaagcaatgttcagatcagtttctgcataattcctttttgtggtaaaatataaataacataaaagttaccattttaaccatttgtaaagcagcccagtggccataagtacatttacactgctctgcaaccaacacaccatccatctccagaactttttcatcctctccaaactgaaactttgtgcccgctaaacaacagctccccattcctctggcgcccactccaggcaaccaccattctgctttttgtatctatgaattttactatccctaggtacctcatgtaaatggaattgtataatagttatccttttgtgactagtttatttcaccaagcataatgtctttgaggttcatccatattttagcatgtgtcagaatttcctttctttttaaggctgaatagtattctaatgtatgttcatacattttgtttatccattcgtcagttagtggacatttgagttgtgtctgtcttggttattgtgaataatggtgctatgaacattgatatacaaatatctgaatctctgctttcagttttttggggtatatacagaagtggaattgctagatcatatagcaattctgtgtttagtttttgatctgcataatctctttaaatctcttttagcgttaatatttggattcttttttcttcacatgtccagcccaatcaaagcatgaaatctttacagagtgtgacttgaaactttaggagatcttttaagaccatattcattgtgattttttttttaactataatgttatgttgtgaggcctttaacaaataaaattacattcatagcacatgcaagttctgtctctatttttagctgactgtatcatgttcctagttccttcccttcccagcttagatttcatgatccatcatggaatcaatcagtcacttgcaaacatccttatccctgttcttcctacttgccttgaaaattcccaaaccttcttaaacccaactttttgtcctattctgtgcctgcactcaagcagctgaacatgtttggaggaaaagcacaaaccctggagcttgcctcactttacatttattagcacaaatccaaaattaatataaaactaccctgcagtcataataaattgctctgtagcaaatttgttttttcattttcattttcatactttttccttgtttcctgaaacttccagtatttgtttcctactccccacagatcaatatattttgctgtcaaaataagtgtagtcagcagtgatttagcctaacctgcccatcatcatctaatttctgctctgtatgcagatattttcttctgcctcctctaacagagtgaactgttaccctttttgttcaaggccagaactttcacttgtgcacagttcttatctgctttcacctacccaagaacttgtcttcagttcttaataactgaagcccatctccctctctccttgtcaataaatgtttacctctctcaaattattctcattagcatgagcaaatatattttaatgttttgcctttaaaaaatactccatttctctagtctcctatgtagcaaaattcacttagagttgcctataaagtccttcaagatttaaacaataatgttgaaacaccataaacaaaccacccagcttaagaaataaaacattatcaattcagttgaatgtctctgtgatcctttccccgtggactccccttcttattcaccagatatcacattctctctaatttggttattatctccagcccactccactgagattgtcctagacacagtcaccactgacttccagtatactaaatttagtagtcaattatctatcttcatatgattcaacttcttaataatcatttggtagtgttgacgcataacatttttctaaaattgtttcctcacttagtttccataatatcaaactaatctatttcttatattagctaattgataactactgaattgtcctttttcccatccttgaaatattggttgccccagaattcagttctctaactttttatctttcctgtctttactctctccttgggttatcttacggtttaaatattaatataatttgtatgctgacaactctcaaatctctctcaactaatttcccgaactccagacattgcctgctccgaacctactccctactgtttccttcacttctgtccatctcagtaaatggtacctttactcacccacctatcaggcctgacactaggattcatcctttttctttccttcttttattcacactatgattacagtccattaacaaaatgtatcccaattccagccacttatcactatcaccattcctactgccctaatccaacccactatgatctctcacttcagctactgtagtcgccttttaactggttttctgatagtcattctcaaaccctttatgttttatctcacagtagcctggcttttcaaaatccaccaatggtttcgctgccttagaacaggatttgaactctttattatgtcttttaaggccctgcaagaactgaacctctacctttatctccaatcttatcttctgccacttatggtcattcacaaatttaatttaagacttctgagataccactatttctttgacccacccccatgacattctgattatgtatctgacatggggttcagagtatttgtatttaaaaaaaaatcacctcagttgattcttattcaggttatcttgacaccaccttactgagaaacaatgtttttagtaaataatgaggacaggaatgtattcctacatagagaaaggttttttgaagttcatacctgcaggagctttcttcccaaactttacatgtaaagttcgaaaaagctccccaggtgaaactggtatgatgccctatccaaccattaccagcaagtggcacatccctctattccatggagccatcatctttctctgtcgccaatttcttcaaaacctaagaatgaacatttagtatactttagatgccaggcagattggtgggtaagttggaattttgtcataaaattatggaatttgacttgtacatcattaacggatgatcggcgttttgtagtcagagctgagactttccttagaagacaagttgatcctcaagtcagccagaatgttcagcgaatactgaaattcttcctaagcaagttatactttagattagaatatatttgactctttatatctggcaactgatttttgtttgtgtagggatattttggtttggttatcttgtaggtctctttgaactttccaattgaacagtgatcttaattgcctttcttttatttatttatttttttgagacagggtcttgctctgttgcctgggctggagtacaatggctcgatcttggcttactgcagtctctgcctcctgggttcaagtgattctcgtgcctcagccactcaagtagctgggattaccgatgcgcaccatcacgcctggctaatttttgtatttttagtaaagtaatttctagttaatttttgtaattttagtaaaattttgtacttttctccatgttggccactcctgacctcaagtgatccactcacctcagcctctcaaagtgctgggattataggcgtgagccaccacacctgaccttagttgctatttttaaaacactgcatattctgatccattctgtggtcaatggccgggcattggtgatatttctatcaaaattttgcagtaagtaaatttattgtatgctgatttcagataatttatgcatttcacaataagtctgaaaacctaattcattttaaaagattgaaagttagaatggctgggtgtggtggctcacgcccataatcccagcatttgggaggccaaggtggccaaatcacctgaagtctggagttccagaccagcctggccaaaatggtgaaaccctgtctctactaaaaatacaaaacttagcccggtgtggtggcaggtgcctgtaatcccagctacttgggagtctggagcaggagaattgcttaaacctgggaggcagaggttgcagtgagctgagactgtgggccactgccctccagcctgggcgacaagagcatccatctcaaaaaaaaaaaaaaaaaaaaaaaaaaaagcaggataatatgaaataatgtcctatattaggcaacatttcaactctttaattgcctcctcttttctgcttattttagtaagtgtcgattttatatagtattcttttctaagtccaaagatgtatacactttgtctggagtaagcagaaggtcaaatatatgtccctcatctaaagtacttagaatggtggtttatttagctactaaaatgattactcacttgggcaagttacattgcctttcagaatttcaggtttctctataaatcaaaggttaactacagccatctggccaaatctcacctgcttctatatagtccatgagctgagaatttttaaagggtttggaaaaaatgcaacagtgaccctttgtggtctgcaaaacctaaaatattgactatctgaccttttaaattttaaaaaataatatgaaagaattataatgctaggaaacttggtaaatacattttgctttaataattagaatgtgttgatcctttaaagttaattaactgtatctcgggaggatagccacttaatgaagttgtatgttgtatcagctgtttttttatgtgtaaaaaagcaagtttgaagaaatttaaatttcccatgtcaaattttgttttagggataattagcatatacaataatacctttagaattgaaatatctactttcttaaaataatttatgcaagtactaattgatagattggcatatattattagttctattactaaaatcagtgcatttttgtgttttgtttccttttatttagatagaagcagatttgggatatcctggaggtaaagcaagaattattcataaggaatctgatatcattactgcgtttgctgttaataaggtaagtacatagacattcttcttttgtttattaagtatttatagttggataatatcttctgttttatcagtttatccagtatttctttcccaaagctgcttccagttccttaaattgcaatctggatacttttttaattttataaaatgatattatttgataatgtgattttgttattatatgattttggagatacagctgatacataatgttttattactatgcagagagaagtaccaaatatatagacaatcgctttagaatttatacaatgtactatagtagttaacccacagaaaaagttttttatgttccttatgaatatgtcaaatgtggttctgggtatttggtaagatttaagcttatatgtgactcaaattctccctctttgatttatacctccgatagctgcccaacgtgtgtattttcttagtatttcttaaatttctacttaacatcctccttagatgtctatacactcctcacagaagaggtggccttaggtactatagtccaagattgaaatctgtcttattaatcattttccccttctgtctcccctaattgccttactgtatggttcctaatgacttctagttattcttttgttttccttccattaacttaaaggatatgtgtatcttctttttatgtattcatagaagatacctaaaggagatattgtatacatatatataagatgttcatatgttcctaattttaaaataattgttaaatgttatgtagatacataccctgtaatatgtatatgtaatatgtaatacagggaagtgtgatatacggggaaattacccatttagtaatcctttcaccagttggttttctgtctttctgtgctatgtctgtcttctctgaattcttctggacagtatctttgttgttctgtgtgcttcacttaatttccttcttagacaccgttgagcaatgactggctaaagggctgattccagatttgcctgcttcagacagttctgttatcaaagaaacagttctgtttgaaacaggcaaatctggagtcagccccttagccagttgtaatatctgtataacatgatattatatatacatgtcaaatacaaaattattggccaggtgtggttgctcacacctgtcatcccaacactttgggaggccaaggcagtaggatcactagaggccaggagtttgataccagcctgggcaacattgtgagaccctgtctctacaaaaaaaaattatctatacctgcattacctgctctttcttgaagaaaatatgatttaaaatagtctgtgctataaaagaaactagttgttttcttcttgagggtttatatataagtactggtaatgaatagctattcacatatataaagtctacaagttactgtctatgaatatgcctgtttaatttttatttccccagatttgctatttttatttattttattttattttattttactttattttattttattttattttgagacggagtctcgctctgttgcccaggctggagtgcagtggcgcgatcttggcttactgcaacctctgcctcccgggttcaagcgattctcctgcctcagcctcccaagtagctgggactacaggtgtgcaccactacacccagctaatttttgtatttttagtagagacggcgtttcaccatgttggttggccaggatggtctcgatctctttacctcgtgatccgcctgcctcggcctcccaaagtgctgggattacaggcgtgagccactgcacccagctgatatgctatttttaatatccttactaaatttgcagctgagaaataatacctcttgctttaagttgcatttttttaaatgccattgagattttttttgccatttgtttagttgggaactacctgtgtcaaaaactatgaagggtctcagattttaccttaaattaaaactaacagttagctttctgtttctgttgccacagaaacagttctgtttgaggcaggcagtggattgtttaaacagtccatttaattgatccattaaacattttagtggatgctgttagaagacatacgactcttggatcagagacaaaggacagtttatgtctaacagcaaaagcaataaccagaaaatcagcactttacactggttgcctgagccacaatttccagagaatgacgggaagagggccagatgatacctaccttacctacacacatagtaggttatattacaggagaggatctctgagtttaggggacccaaatcttttataatcgatagtaagcatacttgccctttgctctggagggagagacgatagttatacaaacatcctggcaattatactgcagaaaaaagggcagacatgactcacttataaaacatgcagaatttgggatacccatggagaataaccacccaataatctagctatatcattttttcatttatttctaaggtctcagttttttcttaatagtttgtgttaaaatctaacataacagtaatggtaatcctattttctctttgctgtcaatatcttcctgttttctgtttcaaagatacacatttaattaattaattaatttatttatttatttatttattgagacagggtatcatgcctggtgcccagtgctgtggtgcaatgtcagctcactgcagcctcgacctcctgggctcaagcaatcgtttcacctcattctcccaagtagctgggactgcaggtgcatgccaccatgcccaactaatttttgtattttttgtagagacagtgttttgccatgttgcccaggctactatcgaactcctgagctcaagctgtctgcctgcttcagcctcctaaagtgctaggattatagacgtgagccactgcccccagccaagatgtacatttttgattcataggcatttaaaatttcatgtcatttaaccttagcaacttttcatttgtgatctttttctggcatacttctcccactatatttctgcccctacaccttttttctgtgaccctttcccacttcttttttttttttttgcctaagattgaaaagctttaggagaaagtttgttttatttaaataattaataattatgtttttagtttggagttccttattgccctcacctttctgtaccctacaggttcctatctttttcagcatcttcctccacatttctgaattgtgcataccttagagcgatcatagcattctagcagtctagaaaaacagtactgggagaggaaataaaatgctgcatgtattgccatttatactggctttctattggatgtacttttcatagaacataaacgtatctccaaactgaagcttattatttcactaaaagtaagaatgctgtatatcctgtactttagttatcactgctagaggttatttcaaaactaccattttcaaaagcagctcatatactatctcttttgcctattgcttttaaaattaccatttgacttatttttcaggcaaatagaaactgcatagcaatcgcttccagtcatgatgttcaagaactggatgtttctggaattctggccacacaggtctacacttgggtagatgatgatatagaagtggaaaccaaagggtaccttcatagtttgtttctatttagtaatgttgcaatatgagtgactatatttactgaactaaaactttcaaaagattctttaaagcaatgtatagattgtaagcagagtagaagctgatgtgctaaatgaggggtggcaagagctttaaataagggaactgagagaagagtaagtgaagggaacagaaattgttgaggtatgaggtcattgtgtgtgagttacaaataagagctgaagaaaattaattttaaagggaactataaattcaaattttagacctttcaagtgtaaaaaagaaagaaatgatgagttgtttttattctggttgacattcctttatagatcagaagatttcttggttatacatgctcgtgatgatttaacagctgttcaaggtacaactccatatacacatagcaatcctggcactccaatcaacatgccatggcttggtagtacacagactggcagaggagcatctgtggtatgtaaagttaaaaataaatttaagttatatgtaacttttatttttccctctaggttaatggataaaggatgatttaaaacatttttcttaattcctaaagttttagtaagtcttacatgttggaaattgtaaattttgataatgaagactagtatgttttcatttgaaagggtaataataaattgttttaaaaatatactttgcttgaaaaccaaagagctatattttaattaagaattatttgaaacatggttcagatcaggcttcagcaaggtgttccccatagatcaaatattacccatgacctgtttttatatagctaatatgctaagaatggtgtatacattttagtgaaatggtttatacattgttttttcaatagttgaaaaaacaaacatagtattttttggcacatgaaaattacatgaaactggatttcagtgtttttttacaaataaagttttataggaacacagccagtcatttgtttccattttgtctgtggatgccttcacactacagtggcagaattgagtatctgcaacagaaagtaaatgcccataaagccaaaacacttgctatccagtcctttataaaaaaaggtttgctaaccccttgtctaggtatcttttaatggatatcaattaataactatatccatattaagtatcacttttttaaatgccaggacaaatattctttttttttttttaacaaaaacaatatataatttcttaagttaagcaaaaagcaatataataatgaactgaaacataatttttctgtagtgttggaggatcttttttagccctgattacctagagatgtgattcatatttgtacttccaagcctttattattacgtaggttataggaactaatgaacggatttgaagaagcaaagaaaggtggtagggtttttcagaatttcataagtactgtagaatgctttccttggccaaaaaaaaaattatttttcattaattagtatgagcaattgttcaagtaaaatctgagttatctttaataataccttgtaatattttgtacctaatggagttcctttatagttgctataaccttataatttgcagtatctgttgtagttgttatttactcgtatttaaacattcttcagatgaagcttgagatccaaaaaggtcaagtggatcaacttatgtcactttgttaaatgtatggtagagcttgttttaaagccctctgttctccttagttcagtgatttcaagtagcagtgttttaaggattaaaatgaacttgaaaagcaatctagtaattattcaaatgaaatgacttgctcagtggtggttaaataatttttccagctgacagatatgttacaattcattggtaaaacttactgatattatattcttttaaaggagaactcaaagggaatatatgccaaagaagtgcataggactaataggcacttttttgaattccaacctcagagattacaatatagttcttcctgtaacatctttcttgttggtctcttcctacttctattctttacacagcagcagccagttactcttttctaaaacatcattcaggttgtcactcgctttctaaaaaatttcagatttcccaatacggcttttaaataacaagtcattaatagggccctacaaaatttaaccttctgccatctcatctccctttattctacatctgattctctttgctgtaattacactggcttctttctgtctcttgaacttattaagctcatggttatgtcaggagcccttgactttccttctgcttaaaatgctctatccctctgttgtaccattcacatctcaactcaaatccccccacatttccctggcttccctaattaaggcatttgcccctacccactctacccccagtcaccttatattttatcatctttattatcccttgcgcttaccagttattgaaattattcattacttagttgtgtttttttttttttttttgagatggagtctcgctctattgcccagtctgcagtgcagtggtgcaatattggctcactgcaacctccaccccacaggttcaagcaattctcctgcctcagcctccctagtagctgggattacaggcatgcactaccatgcccggctaatttttgtatttttagtagagatggggttttgccatgttggccaggctggtcttgaactcctggcctcaagtgatgcacccagcttggcctcccaaaatgctgggatgacaggcatgagccaccgtgccctgccttaagttgtcttttttatatgccctggaatctaagctcttcgagagcttggattctgcctgccttgcagattgatgatttctaactagaatggtattggacgtatagtaggtgttcagaaaaatgtgtttatactccaaagcattgtaatacagaaatctaccataggcataacactaaggattgaattttcttcctacctaaatcttaggacatctttttatttcggataactgtgatttgttaacatgagggttcggattgcctcactctaccctcaacaaaaagacaccagtagaataaggttgttcttttttacatggatcttctaaaataatgattttacatattttacatatgctttcagaaacttttttaaacctgtgtttgtatattttttttacgtatggttctcctgtgaatattaaaaaaagaagacaaaagcaagaataggaaccttcaggcatttctttaattaagaagaacatggaatttaaatatgaagtttactaaacagaagtcatatgcagcaggtttttattttttctagagaactgataaaatattttctttatcctttcattttatcaaatgataaaaactaatagcaaaaaaatatcattatgaccagcttctgctattttggagtataactgcatcaatatatgtgtttcagttttatttatccctcttcttttctctggcctagtctctgttctccctaccaactccccaccttctccacaactttaggctaattgaaccatttaaaatccaaaagaataacaataacaaaacctacctgagactgatgctacaaatttaagataacatatatttgtagttatgatgctatataaattggaaatgttctataaatttttcctttaattttatgtgtttgttttactcttatttgacaggctagttaaattattcaaagcataactttaaaatgagtaaatacatagttccaaactgtttttaaatttatttaattttctcttcttttattttcacatgctcctgtcttttaaacttacactattcaggattattactgaataataaatgtaatgggatcagaaaagaattgacaagaaaggagggaagactaaattcttgaaaggaatttatctttagatcctagtcagtaatgcccaaaatatatgtgcaaatataagagctgcactattaaatttctgttatcatgtttagtatttttagcacccataatgatagttatgaactcatgtaaaaataaataaatgaatgttatttgaatttcctgtcacaatttaaatgtttaatcctttttattatgcctataaaataatttttctattttaccagatgattaagaaagccattaataatgttagaagaatgacttctcatccaactcttccttactgtaagttgaataataattagcaattgtcctttcttattcttaaatctatttttggtaattttattataagaaatgtgtgggaacctttttgttttaattgaaagcatttatttgactttttttctagcgaatatttgccagtaaataaaatcttgatttcaaaactgggtaaaaatagaaaaagatatttccctaaaagagaaagctgatttaatgaagtaaattttttgacattttgactaccaatcaaaatttgcgactaccaatacacaaaatttgtgtatttctaagttaacacattttatctttgaacatttctggatttctttgatcatgctaaattatagtgaataattattttaataatagaaccactgccaacctttattacataagccacaaccgtacctcaattatttattacctcatcgtactcagtttgtattttattactttttttcagttggtcttttatgagacacattaatagtaaacataggaaattattattagtttttatattctaaggcagaatatatgtgttttcagttaatcttcctaggaatcttaaaagtttctcttccttcaaccaagaacttaattaatggggaatttattggaggtattgattctggtgggttggaatcaatactcatactggtgtgtgagtattccaagttttttaatatttttttttaagttatgcccttcgtcaaattgtcctactacatagtaacaagaataatgcatgttaattaatgggtattcatgtcccccagtttaatagcctattaaaaactttagaaacttttctcttgggagatattctgataaaatgcagttaacaaaatcagtattcttttctgcttcatttatgataaatgctcaaataatctattatcaaagttgtgtacgctgtacgaaacaaggctcaagagaaccgtatatgtaaaatgaagagaataacatctgttacttatgctagaggtataacataatataaaaaatttgtctgttttcactacatcaaatttattcatcgctagaagtgtgtattttttacccacaagtttaatgtcaggtgagaactaaaaagcagtcatgaagcctatagtgtaaggagtcaaaatgtgttttatatataaaatttaaataatattattctacatcaggaaatacttgatattgcttaaaactaccctattctatgcagtctggttggaagttttctgagatactgaagggacttcatttttctctcagtcccataccatgtgtcctggcaggtgtaaatatcctataccttaatcccataaacttaaagaggccacgctcaaagcttcaaaggtaattgatggacctattgtcagaggtgttaggtagcatcaattactgctgtcttgagagataaatcctttctctgtttagagaactgccaaaactagcagataagacacctgaaaaattaaaagctaattactggattttttttccagtatatcttttcatgtcacaaacaagtcccacaggtagtaatttagtttgataacaaacacttttcgtgttgtgaaaatgttatgagacaggatttttaaaaatattagtctgaagttcagatacctcaagatagctgttttctttccttggaatagatcttttgaaaaattcttaaagaactttttagaagttagcctagtacattttataattttctgagtagaaaacacactgtttctctatgctgtcatgtacagttctgataccagatgtgttggcttttgtccactccaagccattctccacctctccaagtactggctgggtgccttataatttggtttaattatgacacagtctacctggagttagaatcatatcctacaggttaagggctcagtcccacaaaactgctccttacttcagacaccactcgcaggttatcagttttcacctacacatctggcatactggctataaatcagagtgcccacagctccctccttgggtttgattaatttgttacactgattcacagaactcagggaaaatgctttacttacatttatcagtttattataaaagaaacagatgaaaagtacatagaatgaggtctgtaagactcctaagcagaggagcttctctccccttggagttagggtgcactacaaacctggcacatggatgtgttcaccagccaagaagctcatcagatctccttgttcaagagtttttatagaacttaatctccagctccctttcccacccttttctggaggttggcgagtggaactgaaagtttcaatgctttaggctatctgtgggaccccatctaagacactgcattagcataaattcaggtgctcttccatgggttttagtagctgtatgccaggatccagggacaaagaccaaatatgtattttatgtcacactgggtcattttttttcccttctaaaatgtttaatgtgttttccctgtttaatttttttccccttctaaaatgtttaatgtgttttccctttttaataagtatttgttgaaatcatacacttgataggttctatataagcctagctgagtaaaagtgaagtctgctctgctggaacattaataaggaatctcagataagatttttaaaaacctcttgaggctcagaagtcaagccaaggacttgccatctgatttcacctgcagtcctatagatttgggttgattgctcttttcttgaggtcctcagaaaatcctggggttcctttgtctgccaggaagtgatagtctttactcttctgtaaggcaaccatgtaagggactatatatgtacagtaccaggccagtttttctgttttttggttttttttcaaggtatcttatttgctctgtcagcctttggttccttaaagctgtctgggtgatatctgattctgtgcatagtctccaatatgatatatgagtcaaagccttggtaatacgaccgatgtttccaattatgtcctgctataagaaggacaggttctttttgcttttactcctggcaagctgtaaagaacagattcttactgaacttatgcaaataactatattgccatgaaaataagaatactcactaatagcttccaaattctggagggatcaggtagagagaaaaagtaattgttttatctttgttcacgaaggcatactttgccaaatttccataaactactgaatagcttaagagaaaagaaaaaagttttcttaaatctggaaaacaaaataaagacctagcaatgtttcaaaaccataattattaaaaaaccatagattttcttcaataagttattcagcctctcatacttaattcttgttcgacttgatcttggttagcagtttaatgaatttataagttttttcccttagagttctggaagttcttacactgtccaatgataggatctaaatgttatcagaaaccagtacctttcagagtcttttctatgaatctccttgaagacagagcactttaggattatagttacttgcagacactttcagtgaagatcaggagaaacaataaccatctgtcagtgacaaaagacttaacatggccatgactaaagatcaattcattatcataatgcacaattgacaagtaaatttgattgcttctgtggcatacaatattttaacaaaataactgaaagtatggctgataacattatacaaggacacatcagatttttagaaccttcatgcaatttctggaatacttatctaatagtatatacccatacaaatataatataagaaggtatcaccgttatttgacaatgcttcccatgcaatttaacatatcaattaagcctaattattttaacattcttctttttagagggagtgagaacaaattttttttgagatattgcaagggccctttggaaactcgcaaagttagagtgaggtcaaaagtacttcatttataatgtatttttgggaaatttgtcaaaaatatcaaacagtttaaaacacttgattatagtaaggttactgtggaaaaatatttaaccagagtgataattaaaagacatcaaaggcaaatacagaaagttatgttgttgtagaaaaatccttagctattttaatgttgtaggaaaaaaaccttagatattttaatattgaaatatagctaatttaataataatgttaatattaacattaggtcttaggtaatcaaagacctaaaaagacatgaagcacaggaaattatcttgataaaacaaaatctcggctgggcgcggtgactcatgtctgtaatcccacctcttagggaggcagaggtgtggggatagcttgagcccaggagttcaagacctgcctgggcaatatagggagaccccattctccacaataaaggaaaaaaaaaaaagacaaaaaaacaaaatctcgattttgtagtcagattgcttaaaaggtaaaaataataatattaacattaggtctaggtaatcaaagacctaaaaagacatgaagcacaggaaattatcttgataaaacaaaatctcgattttgtggtcagattgcttaaaaggtaaaggaaaacctttcataatctcttgtcaagagaaaaccaatactccagtaaaactttgcaccaatgtacttctgatattaaggctcatcattcttttaataacatatataaatacacacatattagccagcttggccacacataaaattatttttccaaattcctcttacacaaaccctgtatagcattctcgtatccatgcatattttgttctgtactcttcctctttcccaatatggaacagtctgctttaggacaaaaattattctttttcccataagaaaaacatccttcatacctcatagcttcacattccaaaaacatcttactttcctgacatacaaaattatttatctattttcagtagttttaattacatatattgattagaattcttaactgttagtaatgttagtttctagtgaaaactaggtaataagcagttgtgcactgtcagtcacaccagcattctatagagtagcaaatctatatctttcataatttacagaagcatgttctttttcatagtatagtttttcagtgtgtcacaggacacctttactaacagacccaaatatctttattcttctgcaataagaagccaaaagtagataagcttatgtttagcaattaatgttttagtattttatgtaatttggaagtgatctagatattcaattaatatccatcatttaatttaacttaatgaaatactaagggtataagttgtcaaagggatttggaaaactgttttgaagtagacataacaccagacaaggccagccatcaagttagtcattatttattttttgctgacaaattttgtaacaaagataacatgagtgtatttgactagtaagcctaagtaaaataaaagttgtatatcacattatatttagtgctggtaactcttaaggatatgcctgctttaattaaaccaacaaacttaaatttgctttcatttaccaaagattatcccacatcagatgaacttgaaaaacatttgggtctgtttctatctttctaaaagtttaaggaatacttaatttatataagtgcttattttaagtgcgttagatataattattaaaaattaattttgacaataccatctggtgatagaaaaatattacatatatttaacatatataaagtcatacacaaacatacaggcagaagcagattctatagttttccttctaaattttggcgatctgccagatacaaaatatcaaactcagtcgtttataaaaaggatatctgggccgggcacagtggctcacgcctgtaatcccagcactttgggaggccaaggcgggcagatcacaaggtaaggagattgataccaacctggctaacatggtaaaaccccacctctactaaaaatacaaaaaattagctgggcgtggtggcacacgcctgtagtcccatctactcaggaggctgaggcaggagaatcacttgaacccaggaggtggaggttacagtgagccgagatcacacgattgcactccagcctgggcaacagaacaagactccgtctcaaaataaataaataaataaataaataggatatctggatccaaattgtgtttctgaaaatgggacaagattacccacccagattgctaaaactttactattatttgttgaagacttttaagatttctcatttgtcttttgtaaagactcttttagagagacaatttacagttcatttagtcttctagtagcctctgcataccaatcaaaaaatgcctcccactgtttgtgaagcattagagattcccttttatttagtgcttcctgtagatggacaattttgtgtaaattaaaaacttccctgttgtggccaccataattctaaattgtctttggtaaatatactcatttctctaggaaagcacaggttctgggtccataatgtttatgcataaaattagctggagttccagttggaggagtttttgaattccttaaattcagatgaacccatgatttcttgtccttccaaaatcttatctacctgaggcctctgactggacccaatccagtcaggttcagtctgacttctagacctgatctgaatgaaaaatgcttaaaggataaaagttgcaggtttcaggtcaagcggtaaccttcaaatgcacagtgagaaacagtaggcacaaggggcctaccaggaggtaactgtgcctggttacttgttgctcctggaggtcatcatcaggggatctccttcatgttcctctgctgagaactcttaaaacataggtacattaaaaatttaatgagtttattttagctttcagctcaaattcatgaactgggcaacaccagaccagaagccattaaggcttcaccgaggtggcatgaggggaaaacttttataaggtgttcaaggaagcacaacaaagacagtatttgattggttaagtggaaagtcctcagttagaagttagttgggggtttctaattgataagcatctagttagaagttagttggtggtttctgattgattaagcttaagcttcattttactgtttacattgaattgagttttgatttgctcgtataggcatgcaaggccctggagctgtcttagcctaatagcctcccaattaatttcttttttttaagatttttttaagagacagggtctcattatgttgcccaggcaggagttttatggctacttacagcacaatcaaggcacactacagctttgaactcctgggctcaagtgattcttctgcctcagtctcctgagtagctagtactataggtgtgtgccaccaaacccagctcttaattttttaacgttataaataataatagaaaagttgagcgattttagtgcaaccaccccaatttatttttctgattaagctatgcaagcgcattgggggaaagggagtagagccagtcaaatacctagtctcaaaaaactctacctcctaccgctgcccaatggtaaaagctttcaaaccaattgaagttcatttattttaaatatttgataaggaatgagggaaacttgactgatatgtgactagcaagtgctagatgttttatataaatgtattttttttactacctccataccacattaatattgataatgatactctataaattgagtgttatatgttaggcatatttctgggtgccttatatatgtgatctcattttctactcacaactgtccagtgacttatatatcattagtccctttttacaggaaggaaatggtctcagagagattaagtaaatttcctagtataacacaaataataaatggcaaagcgaagaatcaatagtcatttatcttattcatatttctcagtaaaacaagtccggtgcagtggcacgtgcctataaatcccagcctcttagaggctgaagtggaaggatcacttgaggccaagagttaaagaccagccttggcaacactgcaagaccctgtctctaaaaaaaaaaaaaattaactacaaaattacaaaaaaaacagataacatatatttgagatattaggccaatcaggataacttttagaactgatttttttctttagcatgacatttaaaaccttctttaatctgatttttttcaaagaaaaatgtgtatacatttacacattaatagtataataaggattgattctaacctaagaatttcttataatgagtaatatataatttattataaaaaataaaaggctgttaagacatcattgagataactttaaagggaaataaaatttatggagctatgatttaaatgctcctatcgtatttgaggatgtgttcttagtcaaatgaaagtgtattgtataactatttttatgatgaatagtattcaactgaaatttcatacaaaggtaaatttatataagttgatttagatgtttctttcataaagattttcacataggataaagaaataacttttcccaaagattcttgaaataaatctgcaatttttgccctcttgtaatgcagatctgacaggagctcaagatggaagtgtcagaatgtttgaatggggccattctcaacaaataacctgttttcgatctggtggcaattcaagagttacaagaatgagatttaactatcagggaaataaggtattatataaaaatgtaaatggtaaaaaatttattgtgttggaggtttataaattccactagtttgggtttctgaaaagaacagctccgtgggtagtagtaaagtattgatctatatagatgcttttaaattcttctcaaagaacacttaacttcacttgttcttcctagaagtatgttatataggtgtccattaaaactcagttaagtgattcttaatgaccaaacgattataagttcaccttatattacacactttttattattaaatgctcctactctctttatccctcggaacctactcagtgtgtgatccagcagcaagtaacatctagagcttattataaatgcatattattgttccttctccagatgtgctgaatcaccatctgcattttaacccgatattgttgtgatttttacaaatattaaagttttttaagaggtactgctccagaacaacatcagcaaactacatcctagccacctgctttataaataaagttttgttggaccacagttacccccattcattatttttctttggctacttcctactacagcagcatagttcaggaggacaaagaccttatagctggcaaaataaaatatttattatgtggccacctaagaaaaagtttgccagacctgctctagagcatcctttactgtcttcacttctcataatcctttgttcaaactgcccccctccccacttttatgttagacagcaatcttttattgaacagtactgctccttgtgaagcagggctagttcagaggcagtgcacccacagccagcccaaactgcctctttttgctcctaatatgttattagccctttacaaaataattaaagagtaaatcagtcttctttttgtcttcagggccatgctgcaccaaaaattactctcacagactctaactgatggttcaccttgccttttctttcccctcagcctccctcacacattaaattctcctcacacattccttttatcattgtgtgctgcaaccttttttgtctaccatgtttatcacatggctctattttcatttcacaaaagtagttttatgtagttgtgaaacaaaattttgagagcttgtttcttaatactaattagcaacattcttagctccttagtgggaaattaagggaacttagtacagatgcctgtataattctattgtacttttagttgtattctctatcaatgtgctttttgtgcatttcaacttgggttgtcagttttatattgctcctaactaatctctatacctgaacccttatctctctaatgcatcttgccaacagtattatataacaaaaaacatagctacatgattacaatataggtgagatcacattattatttttttcaagaacccttcaaggctcctcatgtcaacttctttaacaagtatttaagaccttctataatgtgactatttttcagctttaacactcactacagccttctgcataggctattttaaggcacaaaaaactgcttgtctttgcctgcacaagtatctttgaccggcagtcaacttactattcattcaccttagccttgacgaagtctaatagcacagcccctaagcatgctatctcttctagtagggaagcctcttaaggtaaatggaagagataactcacactgtatcacagtaattctgatgaattggatattcaattatgaatagaaatacagtgccaaaagccagtgaatatttcagaaaaactaagtgtctggaaaggggtattaagcagaataaataataaataacctatgaggactaattcctcagagattcaagaatatattacatttatacaacaagaacatgctagcattaaacaaggacagtaggaaaacagaaaagagttattggaaattaaaaatacgattcccaaaaatgtggtcagtgggggaactacttattagaaaagctgaacagcagaatggaaatagttgaaaatcaggtttgttgctgggaagcacaaattaagaaactatcccataatgatgataatttaggaaatatttcagaagaaaaaaatggaggaaaaacaatattcaaaggaataatagatacttccccaaagcaaagaatagaatattggaagagaaagggcctaccaagtattgagaagcaacacgtacctgcacacatcctgtttgtgtaacttttggtttttagagttaaagagagaatcctataaggttctaaaaaggagtgagaatgaaaaaggttatttacaacccacatcccaccctgccactaaatgtcgttggcctgtcacaaatagataggagaacaatatccacagaattctgatggacaaggaatgggaactgagtcgatgtgcatccaaactatcattcaaatttgctagcaaaataaacatatttttaggtatacagagacttaacacattccatgtgtataccctttctgaagaacatacctagatctactccagaaaatgtaagataaactagaaaaaggaatagacctgggaaaatattattaacaaatataaaaacagtaggttaatattcataatattagtcatatcagttaaattttttaaaagacaaatagtagagaaatagataaaacatcttaacagtttaccaagaaactttgcctggccagtagccttctaccttcactaataattgaagaagtgcaaataaattgagacttattcttgtctgcataaaattaacaagtattttagattttaaaaataccccatgttaactaaagtgtaagaaaaatggctgtatcaatttatattaccacataggatttaattttggcatagtctattaattttaagtgatgctctttaacaaaactttcccatttctagatgtctatcctacataattatgcaaaggtatatgtatatataggaatgttcaaagcagccctttttatattacagaaaattgaaaacggtatggggaaagttttaaattgtaataccactgtacagtgtaatactacacacagcacaagaatgatctaaatttatgtgtaattacctgggaaagatagctataataaataaaaaatgtaattgtgtagtggtattattatgatcccaattttttaaatgctatattgtgaatttttgaatactcatagaaacaaatctgaaaggaagcacatcaaattgttaatagatgttagatctagaggcagaggagggtgggagtacaaagcagacatttattttatatactttataataagctgcgttatttttataatcaaagggaaaaaatttagctgtcttactcatccttcaagatctgtatcaagaatacctcccttagtggattattttgacatcttaccagtcagacttgccctgagctcccatagcggaattattttactttgataatccttatatcattttactttgtactcttgttcatgtgttttccttattgtttgtttctgaaaatccttattttatctttctggaaatgaacagttttctttcttatatatgataaagttctgtcacatagcataatctgttaatccagtatcctgtttttgtaatacttacagagaatatatagactatgctagaggctactgtaataaaatgggtgtctgatgtttgttctctttatgttcaccctgggatttttaaagtagtagctgaatgtttttctgaaatagatccatgtataggtgaagtgaaaaatcacatgacatacagtcaaatgtttacgagtcaaaatatgggtgtcacactgagggtaaggataaatatatgcttttatatttatattaaatacttttaaatattttctttctctaagtttggaatagttgatgctgatggatatttaagtttgtatcaaacaaactggaaatgttgtccagttactggaagcatgcctaagccatacctggtaagccaagaatttctacctttaaataaaatttgaattttcattttaaataaaccaagaatacgtatttgagacaagaaatatagaactaataaataaaatatagtcctgtgttctcagtcactttgctgtaagattctgtccttgtgttatgtgaaaattactctgtgaagcataaaattccttagtctctgataatttgggaagttgacatgtatagaagcaacatgatacccccagatacctatacatcttgtggattactagagcccttttctaacctcactaaactggttattatattatgcctaaatagaatgattaccagaccaatgcgtctggttatttttctgcaattatctcttatgaacaaacaaagtgaaaaggacatcctatagctggtactgttattttcttgttcatctcttttaatttaggattatgcaggcttttatgaactttctgtggcttcatagaatactgaatttatatttcatatcttcagtgaagctctttataggactaagcaattcctatcagaaaaaaagttaagaatataggttaagattctggtaatttgcccaaggttaattgctagaatacagtactgatctaagtaaaagcaagcaagcatgggaggattgattagggtaccttgaaagaatattaactgtttctcatatttttattaagcttaaagatttagatgtataagtttgttctctaagggactgttttttttaacttttaaaaaaatgaattggtttaaattatgaataactggcttttggagattaagaggattttgtctgttttaaggacacatcatctagcccagctccagtagtgttccaggggaaatggggagttggctcaaaggaataatctttggtgtggtgattttgggatacttaaaaaaaatcattttttattaaagagaaatatgtaaaacataattttgaagcttttataaatgaagaaacctcataattaagtgtactgtttggtagaatattgaaaaatgctatatgttttctaattttgatgactattagtaatttttttcatgtacttgaatttttaaaagcttaaatatttttgaaaaatatatgtcaattatttaacaaaagtctggtatcatctaaaattctagtttctatcttctgaaacagaaattttcactatgctaggagaaggtctttaagtttaacctcatgttttcctttgaacttttggttgaacaaaagcaaagagattcataacgggtcatgatatatgcagcctacttaaatagttcaggaaaagtgtgtgtatgcgtgggtgtctacaaatatgaaagagaagtagaggcaaaacaaatgtgccaaaatgttaaaaagttgctgcatctgggtaaaaggtatatgaaagttctctgtattacttttacaatttttctaaagttcaaaggaaaaaaacgatacagaggatttaagaaagccagaaactacatgatcacttttcgaagaatacatttacctggttatgacatttttagtgagaggagtaacacgtattgtttgtaaccattccagacttggcagtgtcataacaaaacagccaatgattttgtcttcgttagttcctcctctctgatagctacagctggtctttcaactgacaataggtaagagatgatagctaaaattgaagtatgagaaagtatagctgaacttttttttattgtttctgtccttgtgtttgactaaagtttacttatggctttagatacagtatttttattctaaaaactattatttattggccatgttattccagccccacccccaaaagctgtggttgtaagaaagtgtcatctcctgccccagtatctgtctgcctcttttgatttctgttatataactgagttctgagatcaaggcccactgagtttgcttagcttatatatttatctgtaaggccacactttgcactagaaacaggattgtaagactatagattcttcagctcgtcttccgtagatatttcttacgtatgttggtccccccacacagtagaaacaagttttctttgtgcttaagaaaattcagcatctctcctgttaatgtatgtcagtccaactgttagagattcagtgaatacaaaaagaagtttccatattcagacttcatatattattatttgtaaacgcatgttaatctaaagttattcaaatttttaagctataatagtagctttaaattttctgtaaaaattgtgggtcgggcacagtggctcatgcttgtaatcccagcactttgggaggccgaggtgggcggatcacttgaggccaggagtttgagtccagcctgggcaacatggtgaaaccctatctctactaaaaatacaaaaaattagccaggcgtggtggcaggtgcctgtaatcccagctactctgggggctgaggcaggagaatcgcttgaacctgggaggcagaggttgcagtgagccaagatcacaccattgcactccagcctaggcaacaagagtgtaaaactccatctcaaaaaaaaaaaaaaacaaaaaattgtagccagagcatgttggctcatgcctgtaatcccagtgccttggcaggctgaggcaggaggatcatttcagcccaggaatttgagaccagcctgggcaacatagggagactccatctctacaaaaaaaaatttaaaaaattagccagacatggtggcacacatctgtagtcccagctactcgggacattgaggtgggaagattgcttgagcccagaaggtcgaggctgcagtgagccaagattccaccactgcattcttttttttatataaaaattagtttcatataaatttgttggttacttgtatttgttgcttttataaatttaagaaccttctgtgacagcaaggtttaaaggtcacacagttatatatgacatattttttattgttagcttttgtgtcactcagaagtaatctttttttttttttccagaaacgtatgtttgtgggatactcttgtagcacctgccaatagtttagtccatggtaagttttcaaagcattttataaattttgaaagtcaggaaattcataagctaaatattatttataagtggatttgttactgatgacacatatatttattaacccatgagatttcttttgcccaggatggcaggatttgaaagcaaaaagatgcaatatacgtaattaactcttcactataccttgatgggggacagtgagacatcgataatataaaaatcatttgtctttactttgaatctgatagccacaggttatcgttgtaaacatgatgtaaactcaatattatgtcccctcttaccactcctattcaacattgcactggaattcctagctaatgcagtaacacaataataggaaataaaatgtatataaatggaagggaagaaataaaactgtctttattcacagaaaacataattttctataaaatatcccaaagaatctacaaaataaattcacaagtatagcaaggtcccaggatacaaggtcaatatacagttgacccttgaacaacataaggattgggatgctgacccctgcacagatgaaaatcataattttttattccccccagaatttaactactaatagcctagtgtttactggataccttattattaatatagtcaattaacacatattttgtatatgtgttttataggaagctagaaaaaagaaaatgttatgaaaatcatgagtacatacagtagtgtactgtatttattgatattgtaaagtttatgtcatctgtttacaagatgaattttctgtctgaggccgggcgcagtggctcatgcctgtaatcccagcactttgggaggccaaggcgggtggatcacgaggtcaggagatctagacaatcctggctaacacggtgaaaccccatctctacttaaaataccaaaaaaaaattagccaggcgttgtggtggatgcctgtagtcctagctacttgggaggctgaggcaggagaatggtgtgaacccgggaggcggagcttgcagtgagctgagatggagccactgctctccagcctgggcgacagagcaagactccgtctcaaaaaaaaaaaaaaaaaaaagatgaattatctgtctgaaatggcaggcaactacagctgcagacctcaatttgtggtgcatatcaagcaattcaacttttttcttgtaatgtcttgactttggtctgctttttgggagcacttccagcattactagtggcatgttgtatggttcccatggtgttattcaaggtttacactgttgcactaaatacaatgaaaaattcacaagtgccacaggagatcacttttcactgcaatatacagtttactggagagaagacctgctcacatggagatgatgagcatcacacagcattttaagtatatactcgcaacacttgagctaactgcaatagcaacaggaggtggctactaaattataacagtagtacagtatgtactataattaattttatgtacttatgatttcatactgtatttttgtttacatttctcgactgtcgatggcaccacttacaatctgtatttgtgtgcgtatgtttcaataaatttaactttttgtaatttgtgtatattttatggtagtaaatgataaaatagactagtatctacatatgttttatgcattcatggcatactttttcttaattttttggatatttcttggctatgtgggttgtctgcaagttttttcaaattatctcaaatctttaaaaaatgttccaatatatctattgaataaaccacatctaagtggacccacacatttcaaaccagtgttgttgaagggtcagctgtactaaattcagttgctttttgatgcatcaacaatgaacaattgcaatttgaaatttaaagaatattaccatttacaatagcacccaaaacaatgaaatactgagacataaatctaacaaaatatgtacagggtgtgtatgcacaaaactataaaaatgatttaaatcaaagaagatctaaataaatgagtgatactccacattcacagattagaagacacaatattcttaagatgtcagttcgtcttgattttatagattcaacacaatcctaatcaaaattccagcatgctactttgcagatatcaacaaactgattctgaagtttatatgggaaagcaaaggaatagccaaccaaatactagagaaaaacacacttgtgggactcacattatactatctgatttcaacacttataagctacagtaatcaagacattgtggtattagcttaagaatatacatatagatcatagaacagaatggggagcccactaatagactcacatatatagtagacttatgtttaatatgtcacagaggcaattcagtggagaaacgatagtcttttcaacaaataatgccagaacaatttaatgtcaacatataaaaaattgaacccagatacagacctcacctttcataaaaattaactcaaaatggaccataaacctgcatgtaatatgcaaaataatagaacttctggaatgaactaattggatagaagtcagaatagtgattgcttttgttggggaggagaattgaccatgaaggggcatgaaggaacgttctgggatgatgaaaatattctgtaccttgatcttagtgatggttacacagatgtattcatttgtcagtgctcatcaaggtatatacttaaaaagtgtgcattttcctctgggaagttatatctcaaagtgctggtcaaagttccttctctgtaattaattttatttcaagtcttacaataataactaagtgtttagtttatgccatggactatacatgatctgcatatattaaatcctcaggcaaccctattaggtaggtgataatctcttttacaaatgatgaaactgagacttaggtaagtaattcagcagaagtacacatttaatcccacacagaaaccaggattgaaacccaggcaatctaactccagaatcctcactgttcattatgcaatattctccttgagctatatgcagatttttttccctaaaatttgttaggctggactcttttttaaagaaaaatagtatcatatttttatatttctcatactgctgtgtcttcaaattcatgaatcttttattttacaaggcttaatctgctgttaatcccatccagttccttttttatcttgagccttgctgtttttaatctgttaaattttgatttaggcctttcatgcctctaattaacttaaaattataatggacttttaatttccttacctactaattctgtcatctctattatttctgggttagtttcaattgatggatttttcttctccttatgggttatattttctgctttatcacattcctgttaatttattattagatggcaagcattgtgaattttacttcattaagtgcctattatttttgtattctgtaaatgttcttgagctttgctcagggacaacttacttggaaacagttgaatctgggggaccttggttaaacaggaccaaagcagcatttggtctagggctgattttcctccgctactgagtcaaatgcttctgagtactccaccgaggctggtacggaaccagttcaaccagggttcctctcctggtgccatggtcaggaaactctaagtagtaagctagggcagttttatgactcacccagtttgtttcccatctctcagagatcattcttcattaccttatatccagtgtctgaaatcattggtttttatatttcatttgattttttaattgtttcaggcaggattgcaaatctggtctattatttcactttagccaaaagccagaagtctatttcttttattgttaagtgtttttgttttttttttaatttactttcagcatttacctgccatgacagtggagccacagttttagcatatgctccaaaacatcagctactaatatcaggtggcagaaaaggttttacatatgtatttgacctttgtcaacgacaacagaggcagcttttccagagccatgattctcctgttaaagccgttgctgttgatccaactgaagagtactttgttacaggatctgccgaaggcaatataaaggtaaacacagttgatgccacaacatctacaaaatgaaatcttcagaaaccttagctctttaatcgtattgatgacatcaatctatttaaataatagttatattaattcctttgtagtcagcagtgctaattgctatttaatctttcaatgaatggaatatttaacttgaaaattttctatttttcagttgtttgaaaatatgtttaattcatactaaaacaccaaattttccatgaatataaacataattcagatattagaatttgtcttgactccatgttcagagttacataatttactgaatttaatttccaggggctgagaaatgtattgatattttcttttatcccacattgctcgccagtttttcatatatattattatctagtccctcagtgcctaattcaagaattctggataaaccttgcctttagcagtccttttcagagtccattgtgttgaaaacttaagacaggttttttcaaatgttaagcagcttgttaaaaatgttaaacagcttattaaatatgcaaattgctgggtctcactccagaaatactcagttgataagtaagtccaagactcagggatctgcattttaataacacacctagtaattttaatggagggtcttttggccctgtttggtaattggtaaatcagtttagactaatccctatgttattttaatggtcagcaaccctagactaggggggtttagtttcatcgaatttattaatttaagcacttacacttatttagtagaatcagatgggttttttaaaaccagcaaattgttttcataattctcaaccaggaaaagactagaattatggaatttttaaaagcctttttcttaaaatcaaatatatatataccaacagaattattttccttcagtttgaaactactttcttatttggactgactctctagtttagaatatgccatagttaagtcggttctttttttttttttttttgagacggagtcttactctgtcgccaggctggagcacagtggcacgatctcggctcactgcaacctccacctcccgggttcaagcgatttccctgcttcagcttccagagtagctgggactacaggcgtgcgccactacaccctgctaattttttgtgttttagtagagatggggtttcgccatgttggccaggatggtctcgatctcctgaccttgtgatccgcctgcctgcctctgcctcccaaagtgctgggattacagttgtgagccaccgcacctggcctagattggttctttagtttgtactttgatcctgtggtttattgtttaatcaaggttaaaaaaaaaaaagagttgaaaatatacaatgtattcagaagccctaatttaacaaattcatatgcagggtagtatgaattaatgaatttcttagagtaaagaaacgtttagaaaaatgatctccaataaaaccaggaaataagtaggtttcgctaaacctaaaatacatgtcctgaaagcatttacgttcttcccataagtaaagatgcgtataatttgctttacaggcacatttattttgataagggctggaaatacaaaatcttagtaaattaagtatcctgaaattgtaataattgactttgtcttatagttaaaatatagctttgcctggtcagagggcctctaggtgtcaagtacttccctctttctagctgttctgatccctggtgagcattcaataatgtaaagaagagattaccttactgtacacctatacggcaaaagctctgctgagagataggaaacgttgattttaatccctacagtattgtaagtttctgtagcattgtacacttaacctccttgttacctacattgtttctcttactctcttactagatggatttttaagtattttgtgttaaagcaattggtagattacaacactctatacagaatcaaggtgttatgatcctaggcctacacagatttttctctatttttgttttggaaattccttactgcacaggaatgcaggcctaaaatttttatttggtttcttttcttttccttttttttttttttttttttgagatggagtttcactcttgttgcccaggctggagcgcaatggtgtgatcttgggtcactacaaactccacctcccgggtcgaagcagttctcctgccccagcctcctgagtagctgggattacaggcatgtgccacctcgccgggctagttttgtatttttagtagagatggggtttctccttgttggtcaggctggtcttgaactccttaccttaggtggtctgcctgccttgacctcccaaagtgctgggattacaggcatgagccaccgcacctggcctcatttgatttcttaaggtcatcatcaaccctaattttccgtttgttcttaatatctttcagatttggagtctctctacctttggtcttctccatacttttgtcagtgaacatgctcggcagtccatttttagaaatattggaactggagtgatgcaaattgagacagggcctgcaaatcacattttctcctgtggagctgatggaacaatgaaaatgagaatactgccagatcagtttagccctttaaatgaagtgttgaaaaatgatgtgaaatttatgctataacatttttacaataagatgtacaatttattacctatatggaagtggccaacagatataatatacagtgatcattctctatgccacaaattagctaatgctttcttgtttttatatttattttatggagctttgcccttgatgcactgatgccttaaaaattaacaaggtcattcagaagtagattacattgcctaaagtagaatgtgtaagtaatgctgtaataatacatatcatagtatattataatcagtatgtcatagtgttaaaggtgttttgttttcttattgatacttttccacaggcatctctgcatgaatttcttccacagtaaaaatacgttttttgtaaaggcaattgtacataatactcatcacttaattcaccacactctcacttcctttattagccttatacatctcaaactcttctcttaattaatgataggtatttgagtaagaatgaaaaaaataatgaacatcttcattaaaattgtcattgagacgtcagtgataaatgagctagatggctcaatatgtaaggttttcagtagtttaccctccggaacccaagttgtatgtatgtatacgtgtgtgtgtgtgtgtgtgtgtgtatcttacacatcttatttgaacttagttgtatatattagcgaaaactggtttttcatgtgtttttgtgccataacaactattgccaccagaataactttttttttgcaactgtgcttttcatttttaaaaaatttttgaattcccatcctaattttcaaataagtttcaaggagactatcaggattattattttaaagattagatttagtcaaataagtcttagcaggcaataaagtttctgtggtggcatatatcatgtaagacacttaaagtaagtttgtgaatttgtcaactttcgagcatcaaacaaatattttacttaaattttattttatcttatttttaggtgcttttaatctcaaaattctgaaaagcgaatagcagtgttttcagaaacaaatgtgaaagcagtcaaattaagtagatactatttagaaatgtaaaatactctccagatctaccattaatagaaaataaactaaaccttatattttatttttgccaaaatattttattataaaatatgaccaaaatatttaaaatgcacaatgcttttaacttaaatgtgctaaccctgtttctgtctgttttgtgctgtaccttttctgattcagaattatagaaaacttgataaatacttgattttaaccaatgagactacaggcagatgggactaagtgtttatgggacaattatgtactatttaacttaaatatattttgtttaataggaaatatataataatagcattttatgtaataaaatatgggcaacgattatcttggaaattaaagagtcaaagcaaagaaatgaagggctggtaaaatgaattttgtaatatcctcaggatacttttatcttaaaagtatgttgttaaagattttgtaaattgtatttcaacaattttaaatgtgttgagcaagttgcagtgcaaacactgtcattatgtagagagtttatatgcacataataacctgtacctataaatcgtgcaataaccatatgcgactattttgccatggagaaatctgacagcattgcaaacaatagtattgtttgatgtagttaaccttaagttatttttcagtaatttcttcacaaatcaagattcaaacagctttaaacacttccaatgagataaaatatttactattatgcttattagaacaaaaggtgtttaaggatgaactaaatattttaattgagcatttatatggataatcatacattatgtaagcccatatgtatttacatccagagtcataatattttaaataaacaatcatgcagaaacttt

SEQ ID NO: 2 - DNA, 175031 bp, Homo sapiens
  misc_feature (1)..(175031): NC_000015.9, nucleotides c51914967-51739937
tttccgcagctgagcggcgacccgggcggcggcggcggtcgaggagctcccatggcagggacgaggcggagggaaggcgaaaggggggcgaggagttaagccagagcctccgcggggcgggtttccgagggaggcacagagggaaacggctctcgcagcccgaggagggtcaggcgcggagcttgtcgcacctcccgcgcattctgtccagcccgggctccggagatgcatctgcatcaggtcctcaccggagctgtcaaccctggagacaactgctactccgtgggcagcgtcggggatgtccccttcacggtgagcggcggccgggagccctaggggaagataccaggggccagacgcgggggcagggacctcctgtccagggcgcacgcctcctcaggaggctgtgagatgttggtgggccccacccgtggcccctttgcagccttggggtttagttccccctgggacccgtgggaccgtgggtcctgcgtctggtgtaggaaatcacccgttaggggaaaggcttaggaatccaccgcactctccaccccaagcaaacgggcctgaggtgactggactagaaggctcctcctagggcggcccttcggtctgcggtggaggaaagtggtggtgcggctgaaaccccagagcgtccgtttcgcagctgctctcggcgtggaggcgaagagacttggtgttggtctcggagcgtggaggtgaagagacttggtgttggtctcggagcgtggaggcgatgctgcgccttggctccccctgcccgctgtgctagggcagcgaggagctgctggagtctgtggctttaagcctgactctgtatctcctgataatgcaggatcttaattccaacaaaaagatagaaaaattcatcctccgcgcccgaaagatttagaatggaaaggttagagtcacagtggcttggagagctgtctcatttatcaggaggtcgtagtttggtaatcctcctagataatattttaatctgtaaggtagccttttttttaatatagtaaggcaatgtgaaaaatttacaacagtgcttgtttgagaaaagtgtatgtatacataacgttttagaatctccttaaaagctagatgaagtagacatgtttctcaaggagattggactcatcagtcctttttgagagtggaaatgtttaaaccaagccttggagcttcgtttactcatagatagactcccataaattgagttcttttttaaagaatgaaatttatacatggtcttccttataaggaactgtaggcagccagacctttattaaatatattttgtaaactgttcttcttgataaaactggaaattccgtaatggtatgctttttagacaaggaaaaccctttgatgtctgctttccaacagtgtttttaaaactgcggaaaataaagcttcagcaaaactgcagaatcattatgtagcagtgcattctggaacagaatttattttttgacgttttgtgatacattaaccccagaagattgctttttagccattttaattttttagtgtaatccacttggcctagctccagtttagaacgaccccttttgtcatctgtgttttatgtacatgtgacttaaaatattcatatagagctgagctttgtcttcaagtgtgtggagaatcttggtttttggggatagagagaagaaatttccctgttccccagtagtgcagataggaagttcctcagggttagaagagtgggcctctttcatcaagaaacaaagctggaatctttggttatattttcctgctagaatggtggtggtagttttctgcttccatctaaagtggagtgctgtctcacggcaggtctggtatgtagaactaaataaacgggttcagatgcagcctggaaaagcctgtgtaagaactgttagtgctgtgcaggtgtggttatgctgtaggccacttgtgaccagatgcttagagtcattttcaaatcttcttgcacttccctaattcagcgtttcacgaagtctagttgactctgcactgtctaccagatttactccttttcatatccttaaccaccaccttattttacaatcttattggtattaatataaaagctttcaaaactgtcatgtccgataacttcttcatcctccacaccgctgctaggataattttcttcaagtgtcattttactatattactcttggcttaagaatatgtaattgtttttaatagctgtgttaggaaatgtaaacttgtcaagtattctccatctttgactttatttttaattatatgtactcctcactttggcccctctgttacatactgatcttcttactctaaactgcatttttatgttgcaacaagacagtccttttgggtttccaaattcgactcaaaatttacgtggtttaggatgcctgcctgtgacactgttattttggtcttttgacaaatgtaaatacaaacccattttgcacaccatctcatttaactaccttagttttgagcgcactgatccagttttaattttgccatgaactagaaatgatctcttgggctttgtgaaaaacagattgaaaaacaaaacaaaacaaaacaaaaaacaagctgctttcaagcagtctatatataatcaactaacaaatacttaagttcctatgtttgtaaatataggaataataaatagtaataatagtaaaataaaataaagtaatataatagtaaaaataaaaagcaagctcctcttcatggagcctgtcacttgattttagagcaatcagatgaagaaactttagttctggatcagatgattaaaagggggaccagccaggacttggaatgaaggtcttgtgacttctcattgtgtgggcttttcttggtagtatttccttcttaatatcagagtgcctgctctggagagggtgtgtgggtgcgtaggtgggttagtggatggatggaaggcctcccagacatagtgtagaaggaactactgtcttgcaactaactcatgattcttagctgatgttgtgtttcatggtagcctgagaaccttttcaaaatacaatacatactttatttcagagtctaaaattgatacatctttgaagaacagaattgttctaaaaggattttgagtttatgacagtgtaataattgaaagaaatgtgtgttatatattttgctgtgcatggtgggtggcgtgattggttggctgtgaatgactacttgatgtcgtgatgtcccaatttgtgcaatattgacatggtactgcagtctgtagtggacaatctcagctgatgtctgtggttttagtggtatcacgtaagctatgatgcttttcacttgtgtttaggcagtatacagctgtttccttaaacattcgattgtgatttcgtaaatgtagctgtagatatcacattttaaaacatcaccttttgaacaattttgttcttttcagtgtaagatctaggttttcgaaatgttatcctgcaataagtcaaatctctggtagttcaaagagatgatcttctcccgtgtatgagctttattatactttattttgcctttaagacatttcttactacccttcagtgaatgttttgagggtttatgcaacagatattgtaaatttctcattatttatgttattacttttctgaaagatagtccttggctattttttaaactttactgcacatattaaaatattaattgaaataatgatcatacgtgatgattttttaaattaaaaattcatttggccttaaggcttgcagactattttgagatgtataggggcagttactattattccagtgtgacatgatttcaacacattgatcaaagtttacaaaaattagtaagtcatttgcactcttagggaatttataatatactggcagagattaaaatgatttatataattataacataaggcagatggaagagattgtagttgggaaaacaagaagaggttttatggaagagtaaggtttggaaagataagaacaacagaagcaaaggaatggcataatacgaaggataaattattgagtgactgttttctttgcaaaagttactttttaatcacaggacttcttcattaaataacagacactcttagaatgttgaaaaaatataatatgcaaacattacctgtagcttttcaggaaaacgtacctggtattctgacattcaattttttttttaaattaaaataccaacaaaaggttggaaataaatggaaaaccattcatttaaaaattagaaaataatgttgtataacctcttttatggcatttagatatgtcttaactctattgtagaataaaatttcagtcctagagttatggtaacaccaaaccttgaaaatgatcaaccagtttatacatttagcaaatgttgaacacataggtgtgctaagctttgtgggtattaaaaaaaaaaaaaaagaattacaagacatagtcttgatttcagggagtttattgaagaagtgtaggaacctggtagtctaatacgagagtaaaagacacatacctaaccacagtaggccagctgtgcaatattaccagcatttaagtgggaattcaggaagactaagagaacttttggccaggggaatcaaggggttggttagaaacatgcttctgtactggctggttattaatgtgttaacctgtgctgagaggaaagtgaaagacagaagtcaagaatttagaatggacttgttttctaagagaaattggcctttttgttcttggagtgtagcttcttgtttgtttaaacggatacatttaaaaccttgtgggcttgggcttagtgtcaaccagtaagtgaatatagggtttataagttcttatgtccctgcgtagattgttaattagccttcttgcttgtagcaagaagactcctagcaactactcagaaactctggtaaggttctgaataatgtcttccccaaaaatgggaggtcagagaccaactacttgtatggtgttggtgaaatcacttaaacatgtttaggtctttgatctgtaaaagaagttcttaaagatattctttaagtatttagaccacgaatgaaaattatatggacttctctagagattttcaggggtcaaaagagaaaatggactagaaacataaagtggttgtgttgaagttgtaggtctggagtctttatcgtatattgcttctcacttgtatttacaagacttgatcagatctcacttgtatttacaagatttgatcagacctcacagtcggggagtctgacctcctttctggctcagtagataggccattcagagcatttatgaagtagtgggtctaggaatgagtctttgggcttacagctgaggagaagcctcttgattaggttttggtccttggcacctggcagatgatagttgcctgcgactgtcatagtacagtattgggtgggagatgggaccagtgtgatggtgtttaggttctcctttcgcagctttccttttcccgtgcaatgcctttattttagtttctgttcttaggatttgggctatttaaaatattactttagaaattataatcagattatcttaacttggatcttggtaaatttttagaacaaatcagagtctcagtatttaattatctgaaagagcacaggatgttgggtgacaaccataatggcacagtagaaaaacaagtcatgcctgaccaatttaatttccttctgtgaaaccaaggcagtacttaaaatgggatataatatagaatatctaaaattcagatttagtcagacttctctagcttgtcagtttttttttttttttttttttttttagatggagtctcactctgtcacccaggctggagtgcagtggtgcaacctctgctcaccacaacctccatctcctaggttcaagcgattctcctgcctcagcctcctgagtagctggaattacaggtgcgtgccaccatgccaggctaatttttgtatttttagtagagacaggatttcacgatgttggccaggctggcttgaactcttgacctcaagtgatcctcctgcctcagcctcccaaggtattgggattataggcatgagccactgcacccggccatttgtcagtaattttttaaaacaaatttggaagccaaatatttcagtagaagttttagggttttcagtcctttcgagtttgtagaatccttttgcattatgttagtgctctgaaaccctgatccatgatgtaacttggtattgagggacaagtacatcttaacaaaggtgacatgactatattcactctctcttaaagatagctcatgtaatcctggaatttgatgtaaatatgaaaccagttgcctgcacttcttatttttgtgtgtgtgggtttttgttttcttaaatttctttttttttcgtttgcctgcaagttttactctcaaatcctctcatttcatgattcctgaggcttcctttaatgctatctacccctagtcctgaacacctaaaaaatgtaatggttatcatttatctctttcagatacagaaaacagagttaggcccctctaaataatatacatggtaatttggtgggagtgattttaggggaataaataataccctcttagatggattatcattggagagatgttcctttaggtccactgtcttctaaaaactgagccttgggagtaataacatttaatttaattcatactaaataattgttgttttcttcctgtgattttaggagaaacccattggttcgtactaaatcagtagtgttttcttcttgtgatctaaggagaaactcaaaaagtcgtaagtgtgttttgcaagtaagcatagatggacacaaaaaactcataaacattctggcttagactcatttcacagatatatgtagctcatccgttagctgtagttcaaaaacaaaattccatacattttcttaggagtaatgattttggttttgtgctagcaacttcttcatatcatctctggccttgactgcatccacacttaagaggatctaatcagcaggaggtaatcatattatcatcatgtacctttcccataataactcccatcattccttttatgtggatgaataaccaatgttttcagcaaaggccacttcctccatttaggttctaaattgggtgtgattttgtccaccaggagacatttggcagtgtctggagacatttttgattgctgtgactggaggtggggaattggtactgccaactagtgaggagaggccagagatttagataaaacgtcctacagtgcacgggatagtcctccacaatgaagagttaccaagcccaaaatgtcagtagtactgaagttgtgacaaaccctgatttgtaccttacggtttgcatctctctttcctactcaagtgcatgattctagcagtttctcccttctctcataaaaatgctttttctgctctattgaaacactgtcttcatttagccttcttagttttctcctaccatgcttaattgcttcttctcagcctgattccagatttgtatactcagctgtttctttgacatctcctccttgaaggtctaatagctatcacaaagacctcataacattttcctcttccagtcttccctaaatcaataaatagcaactccacttttctttactttccttgtaatctaccttttctcttccatttatgtcccgtatctaatgttagcaaattctaatggttataccttcaaaatgcgtccagaatctgattacttcttatctctactgctgccaccttggtgcaagacagcatcatttttttcccctggataatggcagttgaatcttaaatggtcttcctgccttttctgactctagcctatcctccttcagtttattttcaacatagtagctagaatgctcctgttaaaatacaaataaaatcttgttagccccttattccagactttcacgtggcttttttttccactcagaataaaaacctgagtgcctgcaatgccctctattgctatttctttagcacctaaaacagaaggtggtacaaaaaagtactcaataaattagtaaatggaaaggatacttagtgtaatacacacatagtaaaaacagtgatcttttcataaggctatttttttataatacttcttggtataggtcagtggcattaagtcatatttagaaaaatcaattttatacgatgaaggcagagagctttgatataatataggtgtaaagctgtgctgccctggtttactccaaggatatatattaatgtatcaggaggaattgacaggtggttctcaaattttcctcagtggtgcttttgaaagacttaagtatataatgaattagagattagcctgacaaatacctggagtgtagagattctgtactttaggagtttaatatgttgtattaatttgctggggctgccataacaaaataatacagactgggtagcttaaacaacagattttttttcctcacagttctggagtttggaagtccaagatctatgtgtcagcagatttggtttatctggaggactttctccttgtcttgtacattgcccccttcttgttatttcctcatatggcttttcctttgtgtacatgcacttgcggtgtctttttctcttcttagggacgctagtcttatagggccccacccttaagatctcatttaaccttatattacctcttgaaaggccttacctccaaacacagtcacgttggtagttagagtttcaagctatgaattttggggttacacaatatagtccacaacacatgttaacaatcagctgagctggtcctggaattgaaaattgaggagcctagcaaagacatgattgaggtggccaccctacttggtggtaatctcagctcaaccaaaggagtactcttggatagaagcaagattctgttaaagaaattttaagaatatgctaatatgtggacaaatggaaaattcaaacatgactgtgataattttatgctggacaaattttatatagacataattacaagcacagtttggccattagaagcaaaaagcaaataaaaaccccaaagaattcagatttttttggtttaaaaaattaatataatatctgcattgtaaaaaagttataattccaacagtgttgaaatatagaaagtaaaactgaaagtttccagttcccagaagaattcgtataacttactggttatcctttattcaaaaaatattttggcacctagacattgtgcatacaggataaactagctattgaagtgtactgttgtataagaggacttggtgtatgttgttatgttgcaggaagtcaaggaccctaaacggagggacaggctgaagctatggcagaagaacataaattgtgaagatttcatggacatttattagttccccaaattaatactttcataatttcttacacctgtctttactgcagtctctgaacataaattgtgaagatttcatggacatttatcacttccccagtcaatactcttatgatttcctatgcctgtctttactttaatctcttaatcccgtcatcttcgtaagctgaggatgaatgtctcctcaggaccctgtgatgattgcattaactgcacaaattgtttaaacaatatgaaatctgggcaccttgaaaaaagaacaggataacagcaatgttcagggaacaagggagataaccttaaagtctggctgcctgtgggctgggtggaacagagccatatttctctactttcaaaagcaaataggagaaatatcgctgaattctttttctcagcaaggaacatccctgagaaagagaaggcgtccctaaggggaggcctctaaaatggctgctttggggctggctgtcttttacggtcatagatgggggatgaaataagccctggtctcccttagtgctcccaggcttattaggatgaggaaattcccacctaataaatattggtcagactggttgtctgctctcaaaccctgtctcctgataagatgttttcaatgacaatgcatgcccgaaacttcattagcaattttaatttcaacccggtcctgagatcttgccctgcctccatttgtcttgtgatattttattaccttgtgaagcatatgatctctgtgacccacaccctattcgtacactccctccccttttgaaaatcactaataaaaacttgctggttttgcggcttggggggcatcacggaacctgctgacatgtgatgtctcccccggacacccagctttaaaatttctcttttgtactctttccctttatttcccagactggccgacacttagggaaaatagaaaataacctatatgaaatattgggggtgaatttcccccgatattgttattagctataaattagttaaattggggatcatgtactaatgtgacgatttgattatggaataattgaactatagccattcttcctggcagtattaaatagtgctatctctatgtggttggtatatagaaaacaaggcaatttttaaaagtagtaggattaatatttatcttgtatattaaattggtacgtgaaattaagtctgctttacaaattaaatctagtctagtatcttcattttgtgtctggaattggttcctgccagtgggttcgtggtcttcctgacttcaagaatggagccgcagaccttcgcggtcaatgttacagctcttaaagatggcatggacccaaagaaagagtggtagcaaggtttactgtgcaaagcaaaaggacaaagcttccacagcatggaaggggacccgagcgggttgccgctactggctgtggtagccagcttttattcccttacttgtcccctcctgtgttctgtttctgtgctatcagaatgcccctttttcagtcctccctgcaattggctacttttaggatcctgctgattggtgtgttttacagagcgctgattggtgcattttacaatcctcttgtaagacagaaaagttctccaagtccccattcgacccaggaagtccagctagcttcacctctcaatttcatagatggggatactaatacttttgagaagttaaatgatttaatgaaggccacctagttagtactgtgatagaattaagactggaacacaaagctcccatttctccctcccaccccgcaagatgtaaaaagtaacatatgcccttgtagataatttgaaaaatgctgaagaaagagaaaatcatttataatggcacaatccagagataaccccacttaacattttggtaaattggactgaggcctcatggaggaagctcatattattactgatttgagaatgtttacctgtaattttctttcttgaatgatttttgggtagttattttgctaataatttattctattttgtgtagattttcaaatttatgagtataaagttgttcacagcggcctcttaatatcttcttaggtctgcagcatctctgttgcttcttttgtcattactgccattggttatttgtgcctctccctttttcttcagcaaaggtttatcaactttattaatcttttttaaagaacccactttagctttaccacttctctctgttatatacttattttctattttattaatgtttttcttaatttattatttcctttcttctatattatattaattgtgctgtttttcccctaccttattgagctaaatgcttagctcatttttgtctttctccctaatagatgaatttagaatgtacgttttcttccaagatctgcattctctgcattctacaaagctgtttttaaaaccatgcactcataagtaatttggaagtaaatttctgaatatatgagacttttaaagttacaaatatgcttactaatttctagcatagctgtattgtgtgcaagtggcatgcggtatgtacttctagtctttttaagtttattgaaatttcagttggtcagtttttataagtttttttttttttttgagatggagtctcgctctgtcgcccaggctggagtgcagtggcgcgatctcggctcactgcaagctctgtctcctgggttcatgccattctcctgccttagcctcccaagtagctgggactacaggcaccggccaccatgcccggctaattttttgtatttttattggagacggggtttcaccatgttagccaggatggtctcgatctcctgacctcatgatctgcccgcctcggcctcccaaagttctgggattacaggcgtgagccaccgtgcctggcctttataagtgtttcatatgtgcttaaagaaaatgtgtcctcttcaattgttggacagaattttatatattttaggtcaaggttgttaatcatgttctttaaatctcctaaaactttaccgcttttctgtctgcttattcattttgctgagagatgtgttaaaatctactataaatatgcatttattcctatcttgtggttttgttaattttgttttatttatttgtgcttacaagtttaaaattattatatcttcttggtgaattgatctgttgatcattaggaagtaaccctttttgatttctaacagtgcttctgcagtgtactttctctggcattaatatagttttattagctttctttggttggcatttgtacagtcttatctttttacttcaacttttctgcatagttacgtttcagatcgttcttccaaatacagtgatgcattgattaacaatgaagatgcattcaatatattgctaggcaatttcatcgtcgtgcaaacatcataaagtgtacttacacaaacctagatagtttttttttttttttttaagactgactttcactcttgttgcccaggctggagtgcaatggcgcaatctctgctcactgcaacctccgttctcccgggtttaagtgattttcctgcctcaacctcccaaatagctggaattacaggcatgtaccaccatgcctggctaatttttgtatttttagtagaggtggggtttcaccatgttggccaggctggtctcaaactcctgacctcaggtgatccatcctccttggcctcccaaagtgcagggattacaggcgtgagccaccacacccggccacaaacgtagatagtatagcctagaacatatctaggctatatggtatagcctgttgctcccaggctacaaagctatatagcctgttactgtactgaataatgtacccagttgtactgcattggtatttgtgtatctaaacatatctaaatgtagaaaaggtacagtgaaaatatggcattataatcttatgggaccaccatcatagtttatgtgtggtccattgtagaccgggtccgttgtagaatgttacgtggcacatgactgtaaaacatagttggatttttaaaaatacagcctgacaatttctgtgttcactagaactttcacttcatttatacttaatgtaattactggcatgtttgtgtttaaattcacaatcttactatgtgctttttatttgttccttttgttctttgctcctttttctcctttcttgtgtcttttgaaatgaattttttcattcagttttttccctctagtcctaagactccatattctgtttctattcttttgctagttactctagaaattacaggatgcattcttaacttatttcacttattgaagccttatgagggtttacattctttgtagacaattcaagaaccttttgtattgctttttaactcccttcctgcttataatatatccttctatggtaagcctatttttataaccctggaagacattattattttacagagtcaatgcttacttagatttacccatatgttactttgctcttcgtttcttccttcctctcttacattccatttgagatcattttccttcttcctggagaatctccattagaatttccttggtatcaatctgttagtgttgtaatgttgtcttttgtttgtctaaaaaagcctttttttttcattcttttttaaacttttagtttcaggggtacatgtgcaggtttattatacaggtaagttgtgtgttgcttggtttggtgtacagattattttgtcacccaggtaataagtatagttcccgataggtagttttttgatcctctccctcttccttccttccactcttaagtatgctgtggcatctattgttcccttctttgtgtccatgtgtactcagtgtttagcttccacttataaatgagaatatgtggtatttggttttctgtttctgccttagtttacttaggataatggcctccaactacatacatgttcttgcaaaggacatgatctcatttttttggctgcatagtattctgtggcatatgtgtaccacattttctttatccagtctattattgatgggcatctaggttgattccctgtctttgcaattgtgaatagtgctgcagtggacatacgcatgcatgcgtcttcatggtataacgatttatattcctttggccatatacccaataatgggattgctgggttgaattgtagttctgtttttattttgtttcattcttttttttttgagactgagtcttgctctgttgcccaggctggagtgtagtggtgtgatcttggctcactgcaacctccgcctcccaggttcacgtggttctcctgcctcagcctcccaagtagctgggattacaggtgcgcaccaccacatctggctaatttttgtatttttaggagagaagggtttcaccatgttggccaggctggtcttgaactcctgacctcaagcagtctgcccacctcagcctccaaaagtgctgggattacaggtgtgagcccagcctattttgtttcattcttgaaaggccgttttgctgtcttttagcaggtagacaggtaggtagagcatggcagtgttttctttcagcaccttgaggattatagtcttctggtctctactgtttctgttgagacgtaaactgctaatttactgttggttctttgaaagttatatatttttttctcttagttgcctttgagatttttttcctttgtgtttctgaagttttgctgtgtttggtctatgtatacatttaaaaaatctgcttgggagttttcaaatctgtaaattaatatctttcatcatttattgaaaaatttcagctgtttcttcaaatattgcctctgccctgattgaccttataaaacaaataaatatgtttcagactttctgactttatttctgtgactaataccttttgccatgttttctatctttttttttcttttttctttttttgagacggagtctcgctctgtcgctcaggctggagtgcaatggtgcggtctcggctcactgcaagctctgcctcccgggttcgagccattcttctgcctcagcctcccgagtagctgggactacaggcacctgccaccgtgcctggctaattttttgtatttttagtagagacggggtttcactgtgttagccaggatggtcttgatttcctgaccttgtgatccgcctgcctcggcctcccaaagtgctgggattacagacgtgagccaccgcgcccggcctttttttttttggtgggggcagagtctcactctgtcacccaggctctggagtgcagtggagcaatctcagcttactgcaagttccacctcccaggttcaagcgattctcctgcctcagcctcccgagtagctgggattacaggcatccatcaccatgcctagctaatttttaaatttttagtagggacagggtttcgccatgttggctaggctggtctcgaactctgacctcaggtgatctgcccaccttggcctccgaaagtgctgggattacaggcctgagccaccttgcccggccccatgttttctatctttttatccttttgtgcaacattctagatgtttttttctaatcaatttgcaaatcctatattcagccatgtctaatttgctgttaaagccatccgtaagttcttagttttggttgttacactggttctttcatgaggtcttttttccttgtgtgatagatattgttgactttgtgtatttgaaaaaagacttttaggaataacctaaggcccaagatggtggtatcttacccaaaagggaattttaatttaattaggtgacatgtcttggggattttactgtttagggaagacattaattcaagcgcaaggcttgaaattttctaaaccatctaaatgatgcaaagacagatgcgaatctctacaagtggccgggcgccatggctcatgcctgtaatcccagcactttgggaggctgtggtgcgtggataacctgaggtcaggagttcgagaccagcctggtcaactggtgaaaccctgtctctactaaaaatacgaaattagctgggcatagcgtcgtcccagctactcgggaggctgaggcagaagaattgcttgaacccgggaggcagaggttgcagtgagctgagatcgcgccactgcactccagcctgggcgacaagaacaaaactcccatctcacatccacacccccacacacacacatacaaaatctctataagtgtgttggtttaattctaggtctctaatgttatgtggattaatcttcaagatttcagtttaaagtgttgggtagtttattggagtcccatcttttgtcagatggagcactttcatttttgttcctctagatccaagagaccatcaaaatgcagctcagttttaccctcactcttttagattagcaaatgctgttaggacaaattggcattcagtgctgagcacagccttatgttctccttttctcttagattttggcccactaattcctcacagtattttttatttttttagctctttgagtgtttttacatctatgttcattaagaatattaatctggggccgggcgcggtggctcacgcctgtaatcccagcactttgggaggccgaggcgggtggatcatgaggtcaggagatcgagaccatcctggctaacaaggtgaaaccccgtctctactaaaaatacaaaatattagccgggcgcggtggcgggcgcctgtagtcccagctactggggaggctgaggcgggagaatggcgtgaacccgggaagcggagcttgcagtgagccgagattgcgccactgcagtccgcagtccggcctgggcgacagagcgagactccgtctcaaaaaaaaaaaaaaaaaaaaaaaaaaaaaaaaaaaaagaatattaatctgtatgggctgggccgggtagctcacacctataatcccagcagtttggaaggccaaagcaggcagatcacttgaagtcaggagttcgagaccagcctggccaacacggtgaaaccctgtctctactaaaaatacaaaaattagccaggcatggtggcacacgcctgtagtcccagccacttgggaggttgaggcactagaatcacttgaacccaagaggtagaggtggcagtgagctgagatgatgctactgcactctagcctgagtgacagagtgagacgctgtttaaaaaaaatacatatatttatatgtttttttcccccgttgtactgtttttgtcgagttttggtatcatgctaagatgttttttgtatatttcatgaagctttttgtgttttaaatttagatcctatgattcattttgagttaatttttgtgtaaaatatcagattagattttttttttgatatatgaacatccagttgttccaacaccatttgttgaaaagctgccctttctccattgaattgcctttgtacctttgtaaaaaatcaattggctatatttttgtgggtctatttctggaatctgtattctgttgcactgatctatgtctctatccttttgccacaataccactgtcttgattattgactttatggtaagtcttataattgagtagtgtgattctttgaactttattctctttttttacaattgttttagttattctagttcctttacctttccatttaaattttaggatcagtttgtccatagctacaaaaaaaatcctactgggaatgaacttgattgcctttcttttaaatctgtagatcaatttgtggagaagtgacatctttgagtcttccaattatgaacatatgtctatatttatttagatcttctttgatttttcatcagtgtttatgcatatagatctgatacatgttttgttagaagtatttaatttttcagacctatgttaaaatggtatctttttaaacattttattttccaattgtttccagttgttcatggctgcacagaaattctgattttgtatcctgtgaccttattagcactaggcttcttttttttttttgtaaatctcttgggattttcagtgtagatatccacactagctgcaaattagacagtttgaattcttcttttccaatgtatgtgttctttttttttttttccttattgcagtactaggttttttttttatagatgccctttataaggctgagaagattcttttttattccttgtttgctgaaagttattatcataaaggaatcttgagtattgtcaagtgctttttctgtatgcattaatatggttatatattttttctttaaattattaatgtgtggattgccgtgattgagttttgaaaattgaatcagtcttgtagtaccagtataagccccacttcgttatggtatattattgtttttatttgtggctggatttgatttgctaatattttattgagtgtgtttgcatctgtgttcattaagaatattttttattatgttttttctcctgtactgtttttgtctggttttggtatcattgtaatactagcttcatgagtttggaagtattttgtccttttctttttttttttcagacggagtctcactgtgtcacccaggctggagtgcagtggtgcaatctcagctcactgcaagctccgcctcccgggttcgcgccattctcctgcctcagcctcgtgactagctgggactactggtgcctgccaccacgcccggctaatttttttttgttttttagtagagatggggtttcgccatgttagctagtatggtgtcgatctcctgacctcgtgatctgcctgcctgggcctcccaaagtgctgggattacaggcgtgagtcactgcgcccggccgtattttgtccttttctactttctctcaggattatgtagaataggtgttatttcttttttaaatgttagtagaatttataagtgaaacaatctgggcctggagttttctttttcagaagggttttaactatacgtttaatttatttaatagttaaaggactatcctagtaatatgtttcagcttgggtgtgtttttactgtttttggttttagaggaattggtctttttcatctgtttcatttttataggtttgcgtatagagttgtttgtggcatttcgttattatacttttaatgtgtgcagggttagtactgatacccctcttttattcttgatattggtaatttgtgtcttttctctttgcctatcttgctgaagtttttatgttatattgctcttttgatttcattcatattcactcttggttttctgttaatatcattgatatctgcttttttattgtttcctgccttctatgtgatttggaattgttttactcttctttttctaattgattaagatggaaacctatgttattgatttggggagtgcccacacttctttaaacatttttctactagccattttaacatctttgtcagttgatttcaacatctgtgtcttgttgtctcttctcttgcaagttgagattttcttagttctttatatgagtaattttggattatgcctggacatttaaaaatattacgttatgcgactctgggccttttgtaaatcctatggagaatgttgatatttttgttttagcaggaattagagctggctgggttgagatggaaaggtttgaccaaccttctgtatattgtagtttccatgtaagttccattttcaaagcctttgcagtgctagctgaatatactctatcctgtgatgtgccactgagtggccagtatggaacctgggcagtggtctcaaggtctttgctctgctgtttaagcttaagattatgcttgcacagcctggggatgagcccgggagtttacaagcaagtttgttgagttgcctttccagactcctctttctgtgactttcctggtactttctggttttctggctggaaaaccagtcacttcctgtgactgtacctgtctatattcagtgccaaagtacctgtagagaaagaaaaagagcaacgtggatccactctactctcttggggtcatggcacctcagagtagaactgtggaattatttgggggctgtgatatcagaaaatagagaaaagggaaaaaaaagataaagggagaatttttcctccctttctgtgaacattaagagtctcctttcccattccttgagccaaaagtaaatggcttctcctggagctctctgtttttgctgcttggtttaggcctgacagtccaggcctaacttagttcagtaaaatgggaaactctgctagaatagtgaacttcaaactccattcttcttaccgcatttatctgctataattcaccttattaagagtcctcaaatagctgttctgtgctttctgtttatgttttatggctgcatcaagtgggagagacatcactgtggttactttattttacttggaactggagctatgatgtcatttttcataccatcaaaaaggacctagcaacaaatctaatgatatatgtgtaaaactcctataagcaaaattaataaactttattgagagacttaaaggagataaatactatgttcatggactggaagattcactactgtaaaaatatcaaccatttccaagcttatttatgtatctttgatgcattcccaatcaaaattttaagagaattttgtggaatttgatagaatgatgctaaaattttatggagctagatagtgccaagaatagataaggcaatattgaagagcaataaagaagacttctaccagctcaagacttataaaagttgtagtcattaagatagtgagatggcagtctgaggacaaatacaccaaaatcagcaccagaaagagacccacacatttgttgatgtttgatttatatcacaattggcatggtagagtaacaggatggttgatcttttcaatcagtggtgctgggacatcttgttatctacataggaaagaaggaagacttggtccctatctcaccccatacataaaaattaactccaagtagattagagatgtgcaagacagaacaatacatattttagaagggagaattcagaggaatacatgtagaggaaaatgtattgctaaccttgaggttgcaaaagatttcttaaaacatcaaatttttttttttttttttgagatggagtcttgctttgtcacccaggctggaatgcagtggtgcaatctcggctcactgcaagctccgcctcccaggttcacgccattctcctgcctcagcctcccgagtagctgggactacaggcgcctgccaccacgcccggctaattttttgtatttttagtagagatggggtttcaccacgttagccagggtggtctcaatatcctgaccttgtgatccgcccgcctcggtctcccaaagtgctgggattacaggcataagccaccatgcctggccaaattgttttattttcctctaatttgatctttcttgagagtgtctgtaaactctctggagagtggctgttaactgtatgtctgtcctgatggggctccagggattattgtggagctgggatatgaccatatgagatggtcatggatgtttacagtctgtctttcatgagatagttttttatcttggtagatgtcctaatgcttaaatgtcagacctatggccaggtgttcttctcacaggaaacttatactggcagatacccttgtggttcttgtcctatccgtgtccagtttatttgaccaagacagccacgctctaggagaaccctgaccaagcggagaattaggttcaggtgtgttggtcaggtgagctacagaggagatggtaaaacaaaacgcatgaaataacaagcagttttaatttcagattttagagagaagagaaagtagcacaccttgcaaggtcaacaggaagaggggtgccacctaggacacgcaagtgcaaccagtggatgggatgaaagagaaaggacctagggaactaaagcctttactggggtccagggtgttcttaaccaagcaagtttcctatgaggagttctaatttgtaggttggagcaagcaggcatgagtcatgctgtgactaagaggtggtcactgaggcatatctgtgcagggtttggggtcattagggtgagtcaggtagattctacctagctctcctaaaaggaggtgataaccaggaggtggttgtaaaaggcaggtatcttgattgaccacattgaggacctgggaggaaatggagaactaaaaactgtgtcaagggtgactgagccctgattcttgaatgagaaagtcagacttatacttgaaacgaatgccaaggcaacctaaaattataggaattcactacacaaataaaccacaattgcagatagaaatattttggatattgtgagccaggtttctcattattgaagaagagagttacaagtgtagaaagtgggaaggcagccgggtgcaatgggtcacacctgtaatcccagcactttgggaggctgaggcgggcagatcacgaggtcaggagattgagaccatcctggctaacacagtgaaaccctgtctctactaaaaatacaaaaaattagctgggcatgttggcacgtgcctgtaatcccagctacttgggaggctgaggcagaagaatcgcttgaacgtgggaggtgaaggttgcagtgagccaagatggcaccactgcactccagcctgggtgacaaagcgagactccatctcaaaaaaagagaaagtgggaaggccagaatgaaccttgtcaatataattgcattagaggcattagtgtgacctcatagatgtgtatgtgtctatacacatatgaatatattacatgtttatatgaataatgtgtgtatgtatacatgcatatatttgtgtatatttaaacagacatagagcagtgatgtataggtatagagatatgtagatatgatacggatgtttgtattggtgtgtctttgatcctaagccctttcagtggacagttgaaaatagatatgtgtgtgtctgtctatagatacatacataaacatacacacacatttgttttcctaactgtcagctgagaggcctagaagcagtgatacccctgtagcagtgaacacaactggcatctagatcttggtttctaaatacctttgtccactaaaaggaaccactatttcttggaggaatagctgattttaggctggagcatgaaaaatgagatgaatctggaatttcttgtgccagaaagtaaggaattgctcaaagaatggtcatagcatgtcataatgacactggagctagcttaaaggtcttccactggccaaatctgggacaatctgggtatgaaaataaatgatagtggattataaccctttgaataagataaaaatccatgaatttttactgatataaataagtacacaaataaggaacgctcttctttacagagggaaactgacaaatgatgcaacgatggaattagaaaattgccatttggcagccatcatagtagtactaaaactaatggatgaaagtttagtaaggaacaggatatttacataatctcaaaatatattcccacagtatacttattaattataaaggaaaaacaacatagaggagaaacctggaagatactatctgcatttgctgtccaaagtaaacatcatcagagatggggcaaattaacagaagtgccacctgataaaatgcaataagaacattgctacatttctgtggtattcctgccccaaacccataacctaaatctaattgagaggaaacatcagagaaacctgcattttaagatattctataaaataactgatctgtgttcttcaaaagtgttaatgccatgaaagacaaagaaagagtgaagaattattccagattaaaggagtctaaaaagacatagctaaacacttaatctggaattttcttttactataaaggacactattgcagcagttcaagaaatctaagctctatagataatagtattttatcagtatccattgcccgatcttgataattgtactgtggtcatataagacatttttaaggggaaacattaaagtattaaggaataaaaaggaatcatgcctgcaactttcaaatggtccagaaaaaaatatatgtatgtatacagagacaagggtaaagcagatgtaaaatattaacatttggggaatgtggtatacaggaactttttataactttgtataactgtataaatttacaactttttgtaagcctgaaattatgtcaaaataaaaaactaaaagtaaaggaagtactgtatcataaaaggagattaatgatagattggactactttaaaattaggaacttcctcaaagatagcattaaaagtgaaatgcaagttgtggagttggagaaaagaattgcaacatctatatttgacaaaggactagtatccagaatataacaatatctacaaataagaaaatgataacaataacggatgaaatatttgaacaggtgcgtcacaagagaaaatctaaatgaccggtaaatatttgaaaaggagccatagctcattaataatcacaaaaagacagattgaaatcaggagattctattatatacctaacagatttgcacaaaattacttactctcacatgtatctggtgatggcaaggatgtccagtgatgggaattctcatgcactgctagtgacagtataaattggtacaactattttggaaaacaatttagcattaatgccaaaatttaagatacgcctaacctgtgatccatcagttcctcttttgtgtgtatattctagagaaatgcatgcacgtatgcgagatttccctacaagaatgttcatagcagcattgtatgtaataggcaaaatgtccatcaacattagagtggataaattgtggtacataccagggaatattaataagaaatgaaagtgagtgaatcacagttacatacaccaggataaacttctgacctaatgttcagagaaagagacacaaaagcatacagtatgattccatttacataaagttcagaggggaggcaaaactaaaccatattgtttaggcatgcatacagaggttgaaaaactacaaagaaaaataagggggtgatttcccaaaaagggtagtggctacttttgcttgagacggagaagtgtaatttggaagggacagataatcttttgagttgctggaaatactcttctcttcttgggtggtggttacacatgtactcactttaatttattctttgtggaggatgttttaggtacacctctgaatttaaaacattgtcttagtgggttttgtgaggttttatgagggattatgtaggtgcatgtttgtctgcttttttattattattattatactttaagttttagggtacatgtgcacaacgtgcaggttagttacatatgtatacatgtgccatgttggtgtgctgcacccatcaacttgtcatttaacattaggtatatctcctaatgctatcccacccccctcctcccacctcacaacaggccccggtgtgtgatgttccccttcctgtgtccatgtgttcttattgttcagttcccacctatgagtgagaacatgcggtgtttggttttttgtctttgcgatagttagctgagaatgatggtttccagcttcatccatgttcctacaaaggacatgaactcatcattttttatggctgcatagcattccatggtgtatatgtgccacattttcttaatccagtctatcattgttggacatttgggttggttccaagtctttgctattgtgaacagtgccgcagtaaacatatgtgtgcatgtgtctttatagcagcatgatttataatcctttgggtatatacccagtaatgggattgctgggtcaaatggtatttctagttcaagatccctgaggaattgccacactgacttccacaatggtcgaactagtttacagtcccaccagcagtgtaaaagtgttcctatttctccacatcctctccagcacctgttgtttcctgactttttaatgatcgccattctaactggtgtgagatggtatctcattgtggttttgatctgcatttctctgatgaccagtgatgatgagcattttttcatgtgtcttttggctgcataaatgtcttcttttgagaagtgtctgttcatatccttcgcccactttttgatggggctgtttgtttttttcttgtagatttgtttgagttcattgtagattctggatattagccctttgtcagatgagtagtttgcgaaaattttctcccattctgtaggttgcctgttcactctgatggtagtttcttttgctgtgcagaagctctttagtttaattagatcccttttgtcaattttggcttttgttgccactgcttttggtgttttagacatgaagtccttgcccatgcctatgtcctgaatgttattgcctaggttttcttctagggtttttatggttttaggtctaacatttaagtctttaatccatcttgaattaatttttgtataaggtgtaaggaagggatccagtttcagctttctacctatggctagccagttttcccagcaccatttattaaataagaaatcctttccccgtttcttgcttttgtcaggtttgtcaaagatcagatggttgtagatatgtggcattatttctgagggctctgttctgttccattgatctatatctctgttttggtaccagtaccatactgttttggttactgtagccttgtagtatagtttgaagtcaggtggcgtgatgcctccagctttgttcttttggcttaggattgacttggcaatgcaggctctgttttggttccatatgaactttaaagtagttttttccaattctgtgaagaaagtcattggtagcttgatggatggcattgaatctataaattaccttgggcagtatggccattttcacgatattgattcttcctacccatgaacatggaatgttcttccatttatttgtatcctcttttatttcattgagcagtggtttgtagttctccttgaagaggtccttcatgtcctttgtaagatgaattcctagatattttattctctttgaagcaattgtgagtgggagttcactcatgatttggctctctgtttgtctgttattggtatataagaatgcttgtgatttttgcacattgattttgtatcctgagactttgctgaagttgcctatcagcttaaggagattttgggctgagatgatggggttttctggatatacaatcatgtcatctgcaaacagggacaatttgacttcctcttttcctaattgaataccctttatttccttctcctgcctgattgccctggccagaacttccaacactatattgaataggagtggtgagagaggacatccctgtcttgtgccagttttcaaagggaatgcttccagtttttgcccattcactatgatattggctgtgatatgacagaccgtcatagatagctcttattattttgacatacaacccatcaatacctaatttattgagagtttttagcatgaaggttgttgaattttgtcaaaggccttttctgcgtctcttgagataatcatacggtttttgtctttggttctgtttatatgctggattacatttattgatttgcgtatgttgaaccagccttgcatcccagggatgaagcccacttgatcatggtggataagcttcttgatgtgctgctggatttggtttgccagtattttattgaggatttttgcatcaatgttcatcagggatattggtctaaaattctctttttttgttgtgtctctgccaggctttggtatcaggatgatgctggcctcataaaatgagttagggaggattccctctttttcttttgattggaatagtttcaggaggaatggtaccagctcctccttgtacctctggtagaatttggctgtgaatccatctggtcctggatttttttggttggtaagctattaattattgcctcaatttcagagcctgttattggtctgttcagagattcaacttcttcctggtttagtctttggagggtgtatgtgtcgaggaatttatccatttcttctagattttctagtttatttgtgtagaggtgtttatagtattctctgatggtagtttgtatttctgtgggatcagtggtgatatcccctttatcattttttgttgcatctatttgattcttctcttttcttctttattagtcttgctagtggtctatcaattttgttgatcttttcaaaaaaccagcttctggattcattgatttttttgaagggttttttgtgtctctatttccttcagttctgctctgatcttagttatttcttgccttctgctagcttttgactgtgtttgctcttgcttctctagttcttttaattgtgatgttagggtgtcagttttagatctttcctgctttctcttgtgggcatttagtgctataaatttccctctacacactgctttgaatgtgtcccagagattctggtatgtcatgtctttgttctcattggtttcaaagaacatctttatttctgccttcatttcgttatttacccagtagtcattcaggagcaggttgttgagtttccatgtagttgagcggttttgagtgagtttcttaatcctgagttctagtttgattgcactgtggtctgagagacagtttgttataatttctgttcttttccatttgctgaggagtgctttacttccaactatgtggtcaattttggaataagtgcggtgttgtgctgagaagaatgtatattctgttgatttggggtggagagttctgtagatgtctattaggtctgcttggtgcagagctgagttgaattcctggatatccttgttaaccttctgtctcgttgatctgtctaatgttgacagtggggtgttaaagtctcccattattattgtgtgggagtctaagtctctttctaggtctctaaagacttgctttatgaatctgggtgttcctgtattaggtgcatatatatttaggatagttagctcttcttgttgaattcagccctttaccattatgtaatggccttctttgtctcttttgatctttgttggtttaaagtctgttttatcagagactaggattgcaacccctgcctttttttgttttctatttgcttggtagatcttcctccatccctttgttttgagcgtatgtgtgtctctgcacgtgagatgggtttcctgaatacagcacactgatgggtcttgactctttatccaatttgccagtctgtgtcttttaattggagcatttagcccatttacatttaaggttaatattgtcaggtgtgaatttgatcctgtcattatgatgttagctggttattttgctcattagttgatgcaatgtcttcttagcctcgatggtctttacaatttggcatgtttttacagtggctggtactggttgttcctttccatgtttagtgcttccttcaggagctcttttagggcaggcctggcagtgacaaaatctctcagcatttgcttgtctataaaggattttatttctccttcacttatgaagcttagtttggctggatatgaaattctgggtgaaaattcttttctttaagaatgttgaatattggcccccactctcttctggctcttgtagagtttatgccgagagatcagctgttagtctgatgggcttccatttgtgggtggacctttctctctggctgcgcttaacattttttccttcatttcaactttggttaatcagacaattatgtgtcttggagttgctcttgtcaaggagtatctttgtggcgttctctgtatttcctgaatttgaatgttggcctgccttgctggattggggaagttctcctggataatatcctgtagagtgttttccaacttggttccattgtccctgtcactttcaggtacaccaatgagacgtagatttggtcttttcacatagtcccatatttcttggaggctttgttcgtttctttttattcttttttctcttaacttctcttcttgcttcatttcattcatttcatcttccatcactgataccctttcttccagttgatcgaatcagcgactgaggcttgtgcattcgtcatgtagttcctgtgccttggtttttagctccatcaggtcctttaaggacttctctgcattggttattctagttagccattcgtctattttttttttcaaggtttttaacttctttgccatgggttcgaacgttctcctttagctcggagtagtttgatcgtctgaagccttcttctctcagctcgtcaaagtcattctccgtccagctttgttccgttgctgatgaggagctgctttcctttggaggaggagaggcgctctgatttttagagtttccagtttttctgctctgttttttccccatctttgtggttttatctacctttggtctttgatgatggtgacgtacagatggggttttggtgtggatgtcctttctgtttgctagttttccttctaagagtcaggaccctcagctgcaggtctgttggagtttgctggaggtccactccagaccctgtttgcctgggtatcagcagctgaggctgcagaacagcggatattggtgaacagcggatcgttcctctggaagttttgtctcagaggagtacccggccatgtgcggtgtcagtctgcccctactggggggtgcctcccagttaggctactcgggggtcagggacccacttgaggaggcagtctgtccgttctcagatgtccagctgagtgctgggagaaccactgctctcttcaaggctgtcagacggacatttaagtctgcagagggttctgctgccttttgtttagctgtgccctgcccccacaggtggagtctacagaggcaggcaggcctccttgaactgaggtgggctccacccagttggagcttcccaccgctttgtttacctactcaaggctgggcaatggtgggcgcccctcccccagccgcactgccaccttgcagtttgatctcagactgctgtgctagcaatgagcgaggctctgtgggcgtaggaccctccgagccaggcgcgggatataatctcctggtgtgctgtttgctaagaccattgcaaaagcacagtattagggtgggagtgacccgattttccaggtgccgtctgtcaccgctttctttgactaggaaagggaattccctgaccccttgcgcttcctgggtgaggcgatgcctcgccctgcttcggttcacgttcggtgcactgcatccactgtcctgcatccactttccgacactccccagtgagatgaacccggtacctcagttggaaatgcagaaatcacccatcttctgcgtcgctcactctgggagctgtagactggagctgttcctattcggccatcttggctccaccccccttgtctgctatttttaatgagaatctcaagcctttacaaattaaaaaaatacaaacaaaaacttactgtccacttctctctctctcctcctgtcctagcaaaatataagcacatgtggcaggatcctgtgtgtattttctaccacattatgccctgtgtgcctggtctagagtaactgctcaacagacatttgttgacttaatgcttagcagttatcgtattatgaatagttgttgaataaagagttaaaatggaagttgggtgcagtggcatgcctgtagtttcagctacttgggaggctgaggtgggaggatcacctgagcctaggagtttgagtccaactaacatattgagaccccatctcttaaaaaaaaaaaattaaaatggaactagtcaaggcagattaccttagtaatgggaaatttattgtaaggatatagaaaagagaatagtagacaaatcttccaagagtcttgtaacacaagttgtagtacagctgagcctcagttatcagggactcatttctgtggactgcttactctttctagtgggctatgtggtctcttacagtgtctgttcctctttttgtgttgggtctattaaaactggcttacatgagaatcacagtgacttccctggcctctgtgtacataaagccattttggctttagtgcctgttaatacctgctacatttcttgattttactagttgaatatctaggaagtagaatctgacccagttcactcttttaagccagaccacatcatagcttgctggctagcctatggcttttggtattaaattcttggtctttggaatcaagtgtcaacgccagatccagtcagttttatactgttgatcacgtggtctgccagggctgctctttcagaaggactgtagatggggcacttttctctagaaaggcctgtgaataagatgaacaatacatttgacatgataaagcataatttttctattatgtgttgtttagattgtttgcttttttattgctttacataatggtgcaataaacatcttaatactaattgtgatctttgtttgcatgtctggatgttttcttagggtcgagtcctaaaaagagatttactgaatcaaagtactctatttaattctctttatagtctcttaattcataatatcgaattattttccagaaaagttgtatggtttgatgctgtaccatactctagctcattgctttttctatactttattaaaggctgaaaaaaagtacatttagctatctaatgctcaaaagccttgcaatcacatattctgggttccaagcaatcacagataactttagtaactgctatcactgtatgcatcctgttttgctctctttcctcccagaattctcattgtactccttaccctaatttcatggccaaatccacattttctttgaagccctgctctgtatatccctaatctttgtaccagttttgcttctagtcagggcaagaggcaaatgtactgaagtaagagcaaggtttattttaagatacacaataaaccatcaaggaagagcaattggacttcagagtaattggaaatagaaagctggtagtatcaactgctttgttttagggattttatgcattgttttcttacaggtctttcttgtctttgggcatctgatctatttgcttctgaaacttgtgagttcctcttcaagttgcacatgattcttaatagttgccttatttctgaatatgcatgacttttcagctccactctttctggtaactctgggtcttttggtttaaatttcccggagtagactttgattggcttagctcatcttttccagctggttattagccaccgtcatttccagatggttattagtcattattctggaccatcctctaattctgccatctgtgaggaggggaaacatcacaaagtaaagaacatactgtgcctgcttacctacggctctatgtaaaatagtgcacactggattatttaatcttttggagactttttgaagcaaatttgtgtacagccacagaaatacagtgtaaaaaaggggtctcaaatgatctagctgaaatctttcatttggctgctgaaggaaacatctataggaagattgtgatatacccattgttacagtgttagctcctctagattctcaggaatatgctctttccatcatactgaaggtgttggaagtttaattacagtttaatagtataatcacaatttaatagtttaatcatactatttgagcaaagtttttgggacactgttacgactatttccctcaaaatatcaacatttagattaaatggttttccagaaatttccaatagttacaaaaataatttgaagttgtcataaatattaatttatgttggtatatatgacataatatacaattaactttaaaactttcaaatgtaaaatgtattaagaacaaattgagaaacagtattgtggctgggtgtggcagctcacacctgtaatcccagcactttaggaggttgaggcctgtaatcccagcgctcctggccagatcacttgagcccaggagttcgagactagcctggacaacatggtgaaatactatctctaccaaaaaatacaaaaaattaacagggtgtggtgcttgcacctgtggtcctagctatttgggaggctgaagtgggaggattgcttgagtctgggaggtggcagttgaagagagctgagattgtgccactgcactccagcctaggggacagggtgagacctcatctcaaaaaaaaaaaaaacccctaaacaatattgggtcatcaccatcagagtgaacaggcgacctacagaatgggaaaaaaattctgcaacctactcagctgacaaagcactaatatccagaatctacaattaactcaaacaaatttacaagaaaaaaacaaacaaccccatcaaaaagtgggcaaaggatatgaacagacacttctcaaaagaagacatttatgcagccaaaaaacatctgaaaaaatgctcatcatcactggccatcagagaaatgcaaatcaaaaccacaatgagataccatctcacaccagttagaatggcgatcattaaaaagtcaggaaacaacaggtgctggagaggatgtggagaaataggaacacttttacactgctggtgggactgtaaactggttcaaccattgtggaagtcagtgtggcgattcctcagggatctagagctagaaataccatctgacccagccatcccattactggctatatacccaaaggtttataaatcatgctgctataaagacacatgcacacgtatgtttactgcggcactattcacaatagcaaagacttggaaccaacccaaatatccaacaatgatagactggattaagaaaatgtggcacatatacaccatggaatgctatgcagccataaaaaatgatgagttcatgtcctttgtagggacatggatgaagctggaaaccatcattctcagcaaactgtctcaaggacaaaaaaccaaacactgcatattctcactcgtaggtgggaattgaacaatgacaacacatggacacaggaaggagaacatcacataccgggacctgttgtggggtggggggacgggggagggatagcattaggagatatacctaatgctaaatgatgagttaatgggtgcagcacaccaacatggcacatgtatacatatgtaacaaacctgcacgttgtgcacatgtaccctaaaacttaaagtataataaaaaaagttatttttatttctttagaagtagctattttaaaaagtagtattttacttcattatttgttatgaagcaaattgttacatactccaagcttttgagaataaatttgaggctaaaaggtgactgtaggtttttgtatatgttggccaggccatgggactgatttttacagtattgattttttttttttttagagatttttgacaatgaatactttgaatggtttattcttagcactgacatataaatagttattaaaagcactgacatataaaatataagatataagatttttgatttccacttccggatctaccttttattgagaatgcaggcaagctggagatagagttggttttataatggttaattagagcaaataattaattattgcatattttgcttttcaaggtctcattttcctttcagatattactaccaccagtgaaaaaaacacgtttttcttctttatcagaggtatataaatagacttagtttggaccacaagtttgtttctctttagcttagtacttagaagtttgttatagctccatctattagtaaattatcaaaattggctagtttttttttagtaacattaaattactctttttaaagtctaaatttaaaattttacttttataaagaaagttctttctttcaggccagttgctgttttggagtagttaggaagaaatttgaaatcatcttgccttttaccacttactcataaacgcttagaacgttttcttaagttttcttctgttgtttttttcttcccatagatttttgtttttacatatttgtagtcaagctttgtcttatgtttccctcgacatagcacccacagctttgcgtttttctactgctcttgcataaattttgttaattttgcattttctgatatgagttgtttctaagaggaacagtccctttgattaccacacaagcagtcgttattaggttatttccaacatttccgtactcatcattgacttaggttaaacttttttgctgtaagctttcttcatactgtctagttcctttttcatgtatttattttgcttattcagcactctcgagtggactttgggcagttagaataactgaatcatgtcagtaaagtgtgttctcaatcatgtggacaaaagaacttattcaaatgctaccccttccctgcttttcttactgtagtgtggacttacatctcaatggtaggagttttatgtatcttggagttggcggtgccttgtggtgggtgggagttaataatggtaagggtttgtttgtaggtgtgaaaaactgcagaaagacaaatggaccaataatatgaatagtcagtttacagagaaagaaatataaatggctgataaatatgtgaaaagatgcttatcttctaataaaaatacaaattagaacagggagatgtcaggttttgttggaatggaaagattaaaacatttgataatgattggggttagtgagtaagtggagaaataggtacttttatacagcttggggctataatctttttggaagacaatttgcagttgcaattaattttaatcactgatccagcatattatatcttagaatttatcctgtagggattcttggacacatacgcatatatcatctatacatacatgttcatcgaagcattgtttgaaatagtaaaagactggaaacaaccaaaattaattatggcaaagccacaacatgaaatactaatactgtgcagctattaagaagaatgaatataaacagagccaaagacaaaaaccacatgattatctcaatagatgcagaaaaagcctttgacaaaattcaacaacccttcatgctaaaaactctcaataaattaggtattgatgggacgtatttcaaaataataagagctatctatgacaaacccacagccaatatcatactgaatgggcaaaaactggaagcattccctttgaaaactggcacatgacagggatgccctctctcaccgctcctattcaacatagtgttggaagttctggccagggcaatcaggcaggagaaggaaataaagggtattcaattaggaaaagaggaagtcaaattgtccctgtttgcagacgacatgattgtttatctagaaaaccccatcgtctcagcccaaaatctccttaagctgataagcaacttcagcaaagtctcaggatacaaaatcaatgtacaaaaatcacaagcattcttatacaccaacaacagacaaacagagagccaaatcatgggtgaactcccattcacaattgcttcaaagagaataaaatacctaggaatccaacttacaagggatgtgaaggacctcttcaaggagaactacaaaccactgctcaaggaaataaaagaggacacaaacaaatggaagaacattccatgctcatgggtaggaagaatcaatatcgtgaaaatggccatactgcccaaggtaatttacagattcaatgccatccccatcaagctaccaatgactttcttcacagaattggaaaaaactactttaaagttcatatggaaccaaaaaagagcccgcattgccaagtcaatcctaagccaaaagaacaaagctggaggcatcacactacctgacttcaaactatactacaaggctacagtaaccaaaacagcatggtactggtaccaaaacagagatatagatcaatggaacagaacagagccctcagaaataatgccgcatatctacaactatctgatctttgacaaacctgagaaaaacaagcaatggggaaaggattccctatttaataaatggtgctgggaaaactggctagccatatgtagaaagctgaaactggatcccttccttacaccttatacaaaaatcaattcaagatggattaaagatttaaacgttagacctaaaaccataaaaaccctagaagaaaacctaggcattaccattcaggacataggtatgggcaaggacttcatgtccaaaacaccaaaagcaatggcaacaaaagccaaaattgacaaatgggatctaattaaactaaagagcttctgcacagcaaaagaaactaccatcagagtgaacaggcaacctacaacgtgggagaaaattttcgcaacctactcatctgacaaagggctaatatccagaatctacaatgaactcaaacaaatttacaagaaaaaaacaaacaaccccatcaaaaagtgggcgaaggacatgaacagacacttctcaaaagaagacatttatgcagccaaaaaacacatgaagaaatgctcatcatcactggccatcagagaaatgcaaatcaaaaccactatgagatatcatctcacaccagttagaatggcaatcattaaaaagtcaggaaacaacaggtgctggagaggatgtggagaaataggaacacttttacactgttggtgggactgtaaactagttcaaccattgtggaagtcagtgtggcgattcctcagggatctagaactagaaataccatttgacccagccatcccattactgggtatatacccaaaggactataaatcatgctgctataaagacacatgcacacgtatgtttatcgcggcactattcacaatagcaaagacttggaaccaacccaaatgtccaacaatgatagactggattaagaaaatgtggcacatatacaccatggaatactatgcagccataaaaaatgatgagttcatatcctttgtagggacatggatgaaattggaaaccaacattctcagtaaactatcgcaagaacaaaaaaccaaacaccgcatattctcactcataggtgggaattgaacaatgagatcacatggacacaggaaggggaatatcacactctggggactgtggtggggtcgggggaggggggagggatagcattgggagatatacctaatgctagatgacacattagtgggtgcagcgcaccagcatggcacatgtatacatatgtaactaacctgcacaatgtgcacatgtaccctaaaacttagagtataataaaaaaaaaaaaaaaaagaaaaaaaaaaaaaagaagaatgaagtaatttcctctgtgctgatgtagaaagttcttcaagatacattgttaactaagtggaaaataagtggcagaattgtgtatagcatgatcccatttatgttaaaagaagatatataaaagatatacttttatatattgaacatttcaggaagggttcataggtaattattaagtaattgcttcctgggaatgaggaggggaggggtaagaagggtgaaaaggatgagaaggtgacttcattttcttatttaattttaaaatttaatatatgtgtgatttcctctatgaaaaagaaaatcttgttactgaaaacattaatattaaacattttatgtgccttatttaccttgtacatgatttcaatgtatatgtgacttgtgaaatttcttgcttaatcaggaacgtattaaggaaacctatttgtcctttttagaaattaataattctgagagtatcataaagagctagggttttaattaggtgactaaaatggagagaaggaatgggtgttttcctgggaaatctttgttaatctgtgttttgtcctcttggttgtaagatttttcatatgtcaacactggcctcttaagactttctataagatctcttggtacagccaagtaaccatcaaagcccagacaaccctgccttcctgttagtttttttgtttatgagcaaagatcacagcagaagtgaagaatttaaatgcaattaataaagagcaaaaaatttgagcaacagaaaacgaaacgatagaaaaatgtcattagtaaagtggaaaaaacagtaaagagggctgagtttgaattatagtcatgtatttaccttgtgacataggaatttgattaaatcctgtgaaattcctttttcaaaaatattaaggtgggattaataaccaacttctaggattgtggcagtcttgaaagaaagattaggaatatagaatgaaaatagtataatacttgtcacccagtaggtttttaataaatggtacctccttcttgtaattatttttctaactcttaataaaatgtaccttcttcagtagaaaagtagacatatttacattgatcaaaactcactcccagggagcggtgggagtttaatagtaacactcttgatatagtattcttggtaagattatagtactttgttaaacctctcaacatgcttagtacaccttgatttatcaggttttgtttcttttttttggtctttgaagtttagacacttatcagtagttgtcaatgatctcaaactttgaccctgtaacttccgggatgttaaaacatccaactattctatagtaaatgctaatgtaattaatctattgtatgctatagtttcataggaaatgtggtcatgtttgtttaagctttttaaaagttttccttttgttactctccacttcaatttatctgagacataaaggaaatttgagaaattagaacagtgtttgtgggattagagtattagttttcttttctgaaaataatgtagttaagacaattatatataaaactaaagttagagaagactgaatgagtgtgttatgcctcttcacactgcattttaaaagacctctcaacatgcctaatactcccttatcagtgctttttttgtctcttaaatttagacgcatctgtcagtggttgtcagtgatctcaaaatttgcattgttcattaggacattaaaccctctagagcagcggtctccaacctttttggtaccaaggaccggttttgtggaagacagtttttctacagcgaggggtgaaggagagggatggttttgggatgattcaagcacattatgtttatcattagattctcataaagagcatacagcctacatccctagcatgtgcagtttacaatagggcttgagttcctatgagaatctaatgccaccgctgatctggcaggatgtggagctcaggcagtattgctcactcactcactgctcacctcctgctgtgaggcccagttcctaacaggccatggactggtagtaggaattggggacccctgctctaaagaaagcagcaatatctttattgtggtaatagtaccacagcaaagaaaagaaacacattcgcacaactttaaatacaatttttcggagttcagagacctactgaggccatctatgacttatgtctattagacttcaggttgaaaacttttagtttcaatgttcaaagcagagaatacttttctctttcctaataggatggatttggtctataagaataggattataacaagtgagggttaatatttttaaagttttttttggatgtaacagcttatgctacagaattatctctgagctgtgaattactaatatcagctaatcattctttatcatcagagaaacagtttagtccttttataaaacaaatcctcccacatgaatggaaggaaagcaatttttctaagactcttcctcttttcttgggccttctctgtgtgtaggggctgagccatatccttgatttcaagataaagtgttttataggtcagtactgttagaagagcagtacactcgtatattgtgctctggcacaggtcagctctacaaagaatccaaggagggataatccggtcaagggattccatttctccagaaaaggcttgcagtccttttccttgcctccctataataatcctgtggcctatctcccacatgtgaagaggttagtttactaactttactaacttagcttagtcagaagtatttcatttatctaacacaaaggagcccacatccatactctctggggtcaatttagtatttgcttgtagtcttaacgaacaccctgttttcctcctgcactataaattcttcctctggtaaaactagattctgaaaaagaatggaacaaaatcacttttgatctctctaaaattgagagaatgggaatcttttgagtaaattatagattttgtataaactgttggtctttacagaatgcttattctgtgctccatgatgtggtaaattaattgggattacaaaaatgaacacactccttctagcaccaacaggatcttcatggaatagaggtagggcaatgcaatggaaagagcaggaactttactgtgaagcaaatgaatcctcattcagtgaactagggcaaattacttaccctttctgggcctcagcttctctgtcttcaaaagcaggcctgtgaagataatgataatttttgtaaagaccctagcaaaacagcttgatcatagtaggtattcagtaaatggtgaattataaggaaggctttggtagattctcttctagtagatcttctacatttattgatactgttagctggaaaatcagtcagaatctctccctcttttcttaagcttatgaggataggttggccaaattattagcaacaaggcagtgtcagtgtttcaactccaagttctttgactaagtttctaggtacttagacttctggagccagacattcggttaggaagactttaataatttatttactatacagctatttattgacagctgcttatgtgctaggtgttgggaccacaatggtaaacaaggacaaggtaaggtccttgctctgatgaaccattcagtatagtgggaaccagacagacattaaacatgccttaaaaccattaaaatctcatgggccctcaattacagaatgcatgtgattcagtactgactgattatatgagtccctttttcttccacccttggattatttatgcattagactctttagaaaatgcccctgtgcactttttcaagctgttagtgtgcaatagtttaagagattccattctagcagtaatcatggttattatataaaatggtaggcattgcgtaactctggttcaacaggaaactagcaccagacataagttgttccattttgatgggaattactagtttggtagggggtttgagaccattctaaaccagtggtctttaaactttccatttttttccttttcttgagacagggtctcacttagtcacccaggctggagtgcagtggtgcaatcatagctcacttcagccttgacttcccgggcttaagtgattctcccacctcagcttcccgagtagctgggactgcagtcgtgtgacaccacgctcaactaatttttggatgttctgtagagatgaagtctcactgtgtttcccaggctattctcgaactcctaggctcaagtgatcttcctgccttggccttccaaagtgttgggattacaggcatgagccactgtacccagcctcttaacttttagtagctgtgtagtattccagtgtaattcagtaatttatttaactactcctcactgatgagtggtatgattatatttagtttttgctactataaatactgaggctctgaatgtcctacatatattttggcaaacttttgtatatatacttatagggtaaaatagggaatatttgatcaaaaggtatattgtacttaagattttgatagatattgccaaattattttatccatgtagattttaatttagtctggtgtgggactgagcagtctgtgtttctaacaggtttcctaggtgattttgatgcatccaatttgaactattgccggatcagaaaaatggagtatagtacacattctctggaaaacatcaggcaattatggttatctagggaagagtaaaaagccttttcagtgactgagccgtaagagtgaatttatcttaagtagcactagttgctagggatggcacatctttagagaaacaaagtgtactaatatttatctggaatattttatgtctttttgatatataatgtagggaaaagaatgtaagaattgtaaggacctgagtttgaacactttgcatttagtaacagtaatcttgggcaaattaatgcacttgaatttttctttatacagtgatagtatctaccctccaggtttgttgcaaagataaagagagagtgatccaacacttgttgagtacttcttctgtcttctactattttatgactgtctctgtcatggcagtttgtcatttagttgtaattagtaatttacctagtcatctccccattagagtaactgggaccatgtcttgcactttagtgttctcagtccctagcccagacttgagacttggtgcactgttctgtttcttaaatgactgtgtaaattttccattttaattttcacaagtatcctaagagacaagtattatttgcttcattttaccatgaggaaatgcttagggaacttaaataactttcttaagatagcacagcatggcataaccaaaactgaaaactgtgtgtgtgatttcaaactagataaagtctgctttttccatgaatccactttgctgagataatgatataaggcacgttggaaattttgaaattgttcctcaagagtaagatgatttttgttattttaatactatactttaaaaattagcatggtgatccaaacatttcttctgcatatactcaatattccccttcagtttggctttcctgaattcatggtataaccaagtctgccttgtctataagaatgtaagtgatcatttcctcctgtgagtgattttctccatatttttcttgcttgaaattctgtctttgcttttcttttggtgaactttttgatttttataaacacatgggttgaagatgttttatatagtggttatggcaggattttggtaacattggaagttttagtagaattaatgtcttcctgtctggtctttatcttcatttccctctttcattagcagccttatatggatcccttcagggcatgggtcactgattcagatgtcatcacatgtcagccctggctattggatatctctattttgtaggtcgtaaccacactgcttaagggtgtggaaacagtgcggaaaaataccatttcataagttttatgtttatcttgcttttaatggagcttttcttttgagaattgggttgttaggttgttttgaatatttaatcataagtagtttggaagaaaaagaaatatgtcccaactctctgacccttaggtcataaaattcacaaagttgcaaaacaggaatagcatacagcaagaagtgttgcaataggaagaaatgtgtggttttactcattagagttggacatgggaattttcccaacaatttaattctgtgttgtagtctattttcaagatcatatagtggtatttgcccaatattctatataaattcattcattttctattttatttgacttttttacctttggtaaaacaactttgggttggtttcctttctccctcaggcctgatgatgttggggatggatggtggatgttggaggcaggctgcgttgtggattcatttgagtcttgatgcatttaagtttagccattgccttagtgcatgtaattctgcctttgttgttcatgtttatttaactagctctttaaggcatgtggaattgtgttggaaaatgcatgcctgatttctatcttgatatttcttaagcctggtttgaaccctgggaacacagttacagtcttcagtggcttagtatttttagatggagcttttatactttagggtttactgagatgaactttggagagaaagtctaaacagaatgacttatgacctgcaggaacagtggctgttctaagaactggaagaacccttttcctattagtaacagttgttgaatgataatgcatggagtgtcatcagtttattttttaatgtgacttttaatgttcttatttagaaattgatattatattaactattttgtaaaatgtcccaaggtatactttataatggcaataaaatctaagataaaatagtatgtaataagatttcaaaagttacatatcttatgtattgtaaaacttttttttttttttttttttaggcatatggatcaggctgtgatattgttattttggcaaatgactttgaatgtgtacagatcattcctggtgctaagcatggaaacatccaagtcagctgtgtggagtgttctaaccaacaaggaagagtaagggatttaatttctttactgaatgtcatttaaaaatgtgtttaataatctcagaatcttcttatccttttatgcaaagcttgcgtataatttcttatgtattgcttgggtgattattagcagaagttgcaaagtgataggtttatacaaattgtaaagtgccattaaactgataatttgataattgttctacagctgtatgtatactgtcttcaaagatctgtaggccttacaatcctgtgcatactgatattctgccagttaatacttctagcagccattaagccagtaaggggaagtaaacttttttcttctctacctagcaccccttatatcactcatactataacatcaaagttttattaagaaactctgcaagttgttaatatctaatatcatgcttgtcatataggaagtgctttgtaaagtctgttaacataatgaaagattttttgttgagtgaagagtcttatggttcattcaggctttaaaacagaggttttattttgaaatagttaaaatttcatcatatgtacctctcccccaattttcaaacataatgtacatcaaattttggtggcatgtcaagtaaatataggatgtttgctgtatactccagcaattcagtaaggccagtattatgtagccgagttgaatgtctctacgagaatagagtaataaggtttttacctgtaatcattgtaacagtttaaacaatcttagtgttctagaaattgttatttattgggtaacaaatttgatcaagagtatgttaaatcagaatattcatggtgataaatagtaatcatacaaatttatactgaatgataaattatggttactttatcataccatttatcctgccctatcctactgcccatatcaagccttaatatttgtgtaaatgtaccagtacttgacagttcagtgatacatttgacctagtattgaaacacgatttcctggtgtttcctggtacttgtttcttgcttttctaatttttccccccaggtactccccaccctcaagcattgcttacacttagtttagaaaacatggggagtgtcagatttctctttttaattttttgttgctcttctctctaggccaagcaaggtagcttaagcctgcctaaagttgtatgatagttgtcagaggtgaattttagtaaataactcaagtgctggtgataatcgcaatgaacacacattctctggaagtaaaactttttaaaaaagtatataagacattggtattcataccatgggaaacagagcaacttgtgtttctacttttcttgagatggtttaatgtaaataaggcaaaattataatatctttattgtctttattgacatcttcgtttagtccttttatcccccagtccttgtggtgataactttcacattggtgaccttgtattagtctgttataatcattcattcattgattgacatgttgaatggaattattcacaacactttttgcgtaagtgtcatttgaagtagctttctgttgtggattatgatttttcttggaaagaatgttagatgttggataagagttaaaatcactttttggtataacagtgccttaaaatcacaggggatatttttggcaggccttaaaagaatatatacctaattgagttttaaaggttaaccagggtgcagaggtgtcagaaaggacggtttttggtctattccctgtagttaattccatcttaccaagaggagagtgaacttagaaatagccttcaagaaattattggaaaacaggctgtggtagtttctgggaacagagggatttatgtcttttcttaccaggtatgtgacctggaacaaaatcctcctggtccctaaatttcttgcttcagtcctctggagatgtcttcatcagctctttcccccaggtgcagtttatggctccctgacttctccttagcctgttttttgtattccttcctctagatggtgtcccaattggtattttctgtttgatggtataattaggccattttatttgaaatatttttaagacctgttattagttgatgcttttctcatagattttatattattttcactggattataaagtttctgacaaagatgcatgcttttgaaatgtattttttaatagttattttatattaaaaataaaattcttatgaaaaatatgattttttcccatatgtatatatatattttttattatactttaagttctggggcacacgtgcagaacgtgtaggtttgttacataggtatacacgtgccatggtggtttgctgcacccatcaacccatcatctacattaggtatttctcctaatgctatccctcccctagccccccgaccccctgacaggcctcagtgtgtgatgtttcccccagtgtccatgtgttctcgttgttcaactcccactgatgagtgaggacatattgtttggttttctgtttgtgtgttagtttgcagagaataatggtttccagcttcttccatgtccctgcaaaggacatgaactcatccttttttatggctgtgtagtattccatggtgtatatgtgccacattttctttatccagtctatcattgatgggcatttgggttggttctaagtctttgctgttgtgaacagtgctacaataaacatacatgtgcatgtgtctttaaagtagaatgatttataatcctttgggtatatacccagtaatgggattggtgggtcaaatggtatttctggttctagatccttgaggaattcccacactgtcttacacaaatggttgaactaatttacactcccaccaacagtgtaaaagcgttcctatttctccacatcctctccagcatctgttgtttcctggctttttaatgatcaccattctaactgatgtgagatggtatctcattggggttttgatttgcatttctctaatgaccagtgatgacgaacattttttttcatatgtttgttgcttatcagcttaaggagattttgggctgagacaatggggttttctaaatatacaatcatgtcatctgcaaacagagataatttgacttcctctcttcctaattgaataccctttatttctttctcttgcctgattgccctggccagaacttccagtactgtgttgaataggagtgttgagagagggcatccttgtcttgtactggtttgcaaagggaatgcttccagtttttgcccatttagtatgatattggctgtgggtttgtcataaatagctcttattattttgagatacgttccatcattacctagtttattgagagtttttagcatgaagggctgttgaattttgtcaaaggccttttctgcatctattgagataatcatgtggtttttgtcatcggttctctttatgtgatggattacatttattgatttgtgtatgttgaaccagcttcttatcccagggatgaagccgatttgatggtgatggacaagctttttgatgtgctgctggatttggtttgccagtattttattgaggatttttgcattgatgttcatcagccatattggtgtaaaattttcttttttggttgtgtctctgccaggctttggtatcaggatgatgctggcctcataaaatgagttagggaggattccctctttttttattgtttggaatagtttcagaaggaatggtaccagctcctttttgtacctctggtagaattcagctgtgaatccatctggtcctggactttttttggttggtaggctattaattattgcctcaatttcagaacctcttattggtctattcagggattcaacttcttcctggtttagtattgggagggtgtatgtgtccaggaatttatccatttcttctagattttctagtttatgtgtgtagaggtgtttattgtattctctgatggtagtttgtgtttctgtgggatcattggtgatatcccctttatcattttctattgtgtctatttgattcttctctttttttctttattagtctggctagtggtctatgtattttgttaatcttttcaaaaaaccagttcctggattcattgattttttgaagagtttttcatgtttccatctccttcagttctgctctgatcttagttatttcttgccttctgctagcttttgaatatgtttgctcttgcttctctagttcttttaattgtgatgttagggtgtcaattttagatctttcctgctttctcttgtgggcatttagtgctataaatttccctctacacactgctttgaatgtgtcccagagattctggtatgttgtgtctttgttctcattggtttcagagaacatcttttatttctgccttcattttgttatttacccagtagtcattcaggagcaggttgttcagtttgcacgtagttgtgaggttttgagtgaatttcttaattctgagttctaatatgattgcgctgtggtctgagagactatttgttatgatttccattcttttgcatttgctgaggagtgttttacttccaattatgtggtcaattttagaataagtgtgatgtggtgctgagaagaatgtatactctgttgatttggtgtggtgagttctgtagatgtctattatgtctgcttggtgcagagctgagttcaagccctggtatccttgttaattttctgtcttgtcgatgtgtctattattgacagtggagtgttaaagtctcccactattactgtgtgggagtctaagtctctttgtaggtctttaagaacttgctttatgaatctgggtgctcctgtattaggtgcatatatatttaggatagttagctcttctcgttgaattgatccctttaccattatgtaatggccttctttgtctcttttgatctttgttgatttaaagtctgttttatcagagactatgattgcaacccctgcttttttttgctttccattttcttggtaaatcttcctctatccctttattttcagcctgtatgtgtgtctgcatgtgagatgggtctcctgaatacagcacactgatgggtcttgactctttatccagtttgccagtctgtgtcttttaattggggcatttagcctgtttacatttaaggttaatattgtgatgtgtgaatttaatcctgtcattatgatgctagctggttatttcgcctgttaattgatgcagtttcttcatagcattgatggtctttacaatttggtatgtttttgcagtggctggtaccagttgttcctttccatgtttagtgcttccttcactaaggaaggaaggcctggtggtgacaaaatctctcagcatttgcttgtctgtaaaggattttatttctcctttgcctaagaagcttagtttggctggatatgaaattctgggttgaaaattctctttaagaatgttgaatattggcccccactgtcttctggcttatagggtttcttccaagagatctgctgttagtctgatgggcttccctttgtgggtaacccgacctttctctctggctgcccttaacattttttccttcatttcaaccttggttaatctgatgattatgtgtcttggggttgctcttctcgaggaatatctttgtggtgttctctgtatttcctgaatttgaattttggcctgtctttctaggttggggaaactctcctggataatatcctgaagagtgttttccaacttggttccattctccccgtcactttcaggtataccaatcaaacatagattttgtcttttcacatagtcccatatttcttgaaggatttgttcatttgtttcactcttttttctctaatcttgtcctcttgctttatttcattgagtttatctttagtctctgatatcttttcttctgcttgatcagttcggctattgataacttgtgtatgtttcatgaagttctcgtgctgtgtttgtccgctccatcaggtcatttatgttcctctctaagctgattattctcattagcaatttgtctaaccttttttcaaggttcttagcttccttgcactgggttagaacatgcttctttagcttggaggagtttgttattacccaccttctgaagcctacttctgtcagtttgtcaaagtcattctccatccagttttgttcccttgctggcgaggagttgtgatcatttggaggagaagaggtgttctggttttgggaattttcagccattttgcactggtttctccccatcttcatggatttatctaccttttttctttaatgttggtgatgttgatagtattcctttatgtttgttagttttctttctaacagtcaggcccctctgctgcaggtctgctagagtttgctggaggtccactccagaccctgtttgcctgggtatcaccagcggaggctgcggaacaacaaagattgctgcctgttcctacctctgggagctttgtcccagaagggcacccgccagatgccgggcagagctctcctgtatgtggtgtctgtaggcccctactgtgaggtgtctccagtctgggtacacgggggggtcagggacccacttgaggaggcagtctgtcctgtatcagagctcgaatgctgtgctgggagaattgctgctctctttagagctgtcaggcagggacgtttaagtctgctgaagctgtgcctgcagccgccccttcccccacgtgctctgtctcggggagctgtggtgggctccacccagttcaaacttcccagcagctttgtttacactgtgagggtaaaaccatctactcaagcctcagcaatggcggatgcacctcctcccaccaagctcgagtgtcccaggtcaacctcagatgctgtgatagcagtgagaatttcaagccagtggatcttagcttgctgggctccgtgggggtgggacccgctgaaccagacactggagaaaatttcctgttctgctggttgtgaagaccatgggaaaagtgcagtatctgggctagagtgtactgttcttcccggtaccgtctctcacagcttcccttggctagcaaagggaaattccctgaccccttgtgcttcccatgtgaggtgacgccccaccctgcttcagctcaacctctgcgggctgtacccactgtccagccagtcccagtgagatgaacctggtacctcagttggaaatgcaggaatcacctgccttctgtgtccatctcgttgggagctgtagaccagagctgttcctattcagccatcttggcagctgtccatccaaatatgatttctttgaataggtcaaccttgtatatgatatgtaaaataaagcctgctgaattttttgataacaggggagagactcttaactccagtacacttccaggtatatttatggaaggaaataaaccatgaatactgtattgagattatatgtaattagtttatacattattatgaaaaggaagatatctttattttacccttttctagatattaatgctgtatttattcttttttagattgcagcttcatatggtaatgctgtttgtatatttgagcccttgggcataaattctcataaaagaaattgtgtaagtattaaccaataatagaatacttttagaatctagttaactttagaatccaattgatgttaataaaaagctccttaggagctagtgctgaaaatagactagagtatcagtgaaaaattggtctagtgctttatgttaggatccttacattcactacggatacatccctagtgcttttagaaacccaagtctctagaatattgcaaattgacatttactgtgttaactgagatctaccctagtttgaactactgttatttcttgtctggattactaatatctatctgatatctggtttcctgctgccttcagccccagtgtctgttctcaacagaggagatcatgacatttctctgcttaaaactttgtaatggttccatatttctctctcttttttcttttgttttgagacagggtcgcactgtatcccctgggctggagtgcagtggcatgatcactgctcactgcagcctcaacctgtcaaatggtcctcccacctcaacctcccaagtagttgcgactataggcatgtaccaccatggccagctaatttttaaatttttcgtagagatggagtttccctgtgttgctcaggctggtcttgaactctggggctaagtgatcctcccacttcagcctcccaaattgctggaattatgggcatgagccaccatgcccagctgctccatatttctttcagataaaaagccaaaagccttttgtagactacaacttcccttctactcagtagcacagttactatgtctcagagctcacctcgtaagttcttgtcctctctggttctactctggccacattggcatttttactgtttctcagttaaccttccctctttgagcctttgtgttgtttgttttctttgtcaggaatgtttttcctccagctatctccaaggatagctcccatagatcctttaggtctttgctcactaataccttgtcaatgaggtttaccttgaccaccctttaaaaaattgtacccccacttatcttgctatttaaaaatttttttacagcatttatttatttattgtttactatgtaaaatgttatctaaaggtacataagggtaggaagcttttttcactgatgagtccccagtacttagaacagtatctggaacagccaggtgtggtggctcacacctgtaatcccaacactttgggaggctgaggcgggtggaacacgaggtcaggggtttgagatcagcctggccaacatggtgaaaccccgtgtctactaaaaataaaaaaattatccaggtgtggtggcacgtgcctatagtccctgctgctaggaaggctgaggcaggagaatcgcttgaacccaggaggtggaggttgcagtgatcctggactgcaccattgcactccagcttgggagtcagagcaagactccatctcaaaaaaaaaaaaaaaaaagtatctggaacatagtaggtattcctaaatgttggttgaatgaagaagttaggagtttaaaaagctcacttaccagctcagctaagtggttaagcataccacattgtgaaccattcagattcatactgggtgctatattatatttgtcttacttaatgttcaaaacatctaatgtggttagaattaagccctttaaaacatcctgcatgcattacatttttaccatcactcagaaataatcaaaattgcaaatgctaaatctgaatgctgagtatatatttacaaataatttttaaagtatatttttaagtgaaatgccttaaaacaaatggttttggtattttttcattaaatatatgtatttgaatatatctttttacattcccccaaaacagtataaattaaaatattaatctttccctataatagtattgtgaaatggatatcaaattttggactacttaagagtcacctagagcacatactaaacatttaggtttccaggtctcattccccaaatttcttcaaggtagttgctccacagattgcactctgaggaacactaaaggaaagaatattagggatgtctataattttaggaattatttaattactacactaaaatagatttgttgaacagtatttagtgttatgctgttgtgattgttgtttggtcagcagtggtagggtttaaaaatagcattttctctgattataaaatatcaaataatttttggataatgaagtgcagggtttgcagatgcacacacacacacacacacacacacacacacacacacacacacacaccccacacacacattttttttagatatagagtcttgctctgtgacccaggctggaatacagtggtgtgatcatcatagctcactataacctcaaactcatgggctaaagtgatccttctgcctcagcctccaaagtagctgggtctacaggtgtgagctcccatgcccagctaatttttaaagtttttatagagatgggggtcttgcaatgttgcccaggctggtttcaaattcctggccttaagcaatcctcctgtcatggcctcccaaactgttgggatgcagctatgttttaaaattctgccttgaggtagtcaggaaaccttgtatacattttaaaattgttaaatattcttaaaatattataacacaaaatggcattaccgtttaaacagtattatttgccaagccgttaacatatagcttgcctaaggtaacatagctttgcaaagcttttcacaaatgtcctctcacaaaaggacattttatatttatgtactacaaagaaatatgtaaacatttaacatctttatgccagccattacaaacgctgaagataacaaaattatgacacagtttctgcccttgaagagttgcaatttagtgggaggagagtcagatgtatagaccaatactaattccatgtgatcagtgttataatggcagaatgtaaaagtggtattggtgctgccaggatgtcagagaaggcttcatagcagagatgatgagttagctaatcttagtggaaggataggggtttgcagatggagacgtgaggaataggatatcctaaatataagaaggtatttataggcatgagaaaaagcgtgagagaacctgctttgtttgggcatggcaaggagctcaatatggtataataaatagtagtggaaccaatgaaagttacgttaaaaacagtatatgaaaataatagtgaaatattttcatctttgttccagatcttaaagtcttaagttgaagaaaatgataaaatggtagtgttttgggatattatttgaaaaacatctttttcttttttcttatttctttttgtctacgtatttcagcaactcaagtgccagtggcttaaaactgggcagttttttttgagttctgtgacatacaacttagcatgggatcctcaaggtatttagcaattgtatttaaaattatttaaattaaatatttgttttaaatgtatgataataatgtgatatagtctcccataataagaaaatgatcaatgtattatattttctttttgttgatgaatataatttttccttcttggtatacagtgctttgtgcaatgcttaatttactattctgttttttcccctgcctttgtgtgttttatttcaagaagcagttatgatttgtttcctagttaatgtgtactgccctttactcttgttgtatttgctaagaaacaccattggaaataaaacagagaccaaaaaaacttcacctcattttatcatttgtatcaggaaattactatctttaattttgaaaaattaggaatttctaatgataatagctgttgtccctttttatattcacaattaataaggattctttttatatttcatgtgtaaaaccacattttattaatttgtagttatgccttatatctcgaggacattttatgtggtatatatcagagttttggggactttgttattctattaatacatttgttgttagtttttttgacttgcttgataataatagctctttgccagtaagctttactttgttgttctcaaatcttccttaagaatctttgttgtccagaagattcttttttcttataagggactttaaaaaaatatataccaagtgtttttcgttggcgatattgcttacttttcacataatattaatagtttacagatctaaacagaagcccatgtgcatttatttccctatataatatttgcatattcatcataacattctttaattttcagataatagattgttgacagcaactgattctattcagttgtgggctcctccaggagatgatattctggaagaggaggaagaaattgataatacagttcctcctgttttaaatgattggaagtgtgtctggcagtgcaagttagtgtctatttctattgttatattcattaattaaaagcaagtgcttcctaaaatatgtttcctttcacaaagatctttattttttgatggtaccattgcatttagatgcctagaaagtagatttttttctaaccaaaacccatataatagcattctttaatttgtgctatagttaatcatttaaaaaaaggatgaaagtattttcatagttatagccccaggacaggagttgacagggttgatacataggaaatactcattaatagattgaggtaaggatggagagggggaagatgtgaaagttgccagccactctttcaagtggaagatgtactattaacagtcatatagattatgtgacgaagactagtcagggatgatgataagctcagcttttaacatgttatatttaggatgttggtgggacatgtaggtggagatatactgtattcatgttacttacattcttcttttcccaaagtgaatgttggattagttttaataaatttacatttttatggaggtgaaatattttatttatatttttagggaagcaaaaacagtcttattctgaggattctgactttgatgttacaaaaatctcatcttgaccatttttatatacagtacaccagattttaaaagggctaattgcctaactctctcttttttagaacctcagtatctgtacatttgatggaatggtctcctgatggtgaatattttgctactgctggaaaggtaaaggatcaaacaaaaacatacgaaataaacaaataaaagaatttaaaatgttccttatttatttttattttcagttttctcatctgtaaaactgggataatcctccttggcaaagctggcctgaagaataaaagtggtgtttgtaaaagacctggtattttgctcacaggttgtaggcgcttgggaaataatggctattcttattactcttatttgaccttggcttatttgcgtttttaaaaactaagttttgtgtttaaaaatagcatatgtacataacttaaaaagtaaaataatactggattcacaatgaaaagatgtactgcttgcctcattattccaacgctaattcctgtgtccaggaggcaattatttgtcaagttgaatattttgctatttccttccatgtccttcaataacttgcaggtgctcccatttcttgattctgcccagccccctgagttatatatattattttttgccttcccactgtagaagctgaggctttagcttgataaaggtgaggggttgatatccccaacatcatcttcacatctaatatatacacatattcatttcacttgctcctatcttcctgatgtaggtatctcatgattttgggtaaatcagaagttattgtttatgttattaagattgtacagattattcttaatagtaattactttggagatagtaattgctttgttttatggtttgcttttttttctatatacctaattcatccttagaactgctttgactcttttctcagtataatcccacataggaggtattctgggaacatgagttctctttgctctcattcagcttaattgctctaccagtctaaaatagcagagctaccattttcggattttcttttaccaactttgggaaattctctttgcctctctcctttgttaaattttctgtttcttagcatcatttatcttccttttttcttgttttgatggagatatcccccaataggttcctgaagaaaggtgaatgggaaaaaacattttttcaggccttacgtgtctgaaagatttttttcttatgcttgattttctcgggcatagaattgggttgaaaaatcactgaccttcgatattatatctcaataaactttttaattgatatatatatgggatacatgtgatattttgatacatgcgtaatgtgtaatgatggtcaaattagagtatttaggatatccatcacctcaaatgtttatctctttttgtgttggtaacatttcaaatcttctagttaattgaaatgtacaatatattattgttaaccattgccaccctactgtactattgaacactagaacttattccatctatctaactgtgtatttgtaccaattaaccaatttctcttcatctccttttttagctcccacataagattgagaaaataacggtactttttctttgtgtgcttgtcttatttcatgtaacataatgacttctagttccatttatgttactacaagttataggattttgtcctttgtacagccaaatagtattccactgtgtatatttaccacatttcatttatcccttcatttactgatgggcatgtaggttgattctatatctaggctattgtgaatagtgttgcagtaaacatgggagtgtagctatccctttgatacactgatttccttttttttggataaatacccattagtgggattgatgaactgtatggtagttctagttttgtttttttgagaaaactccgtactgttttccataaccactggcacctgagcaagctgcctgtaggcccaaggactggtcctcctggacctgtgactactggcgtcttgtatgctgcctgggagcccaagggcctgcatgcctggcctgcctctgccaccacgggtgcctcagaactggcctgtctggtgtccctgtctgcagcaaagcctcactacagcctctgctaccaaccacagcctaagccaatgagtaactcacagccaccactgacactgactacacctgaagaaattgtatgaagactactctcctgcactcacccagaatcaaagccaaagcacactatccaactaacgctacgacatttgggggacctgttaaatctgaaactcatgtctttcaattctgagagattatattatttctttcgtgttatttctttctctctctgaatcttttcttattcagatatggatacttttacactaattctctattttactatcttccccctttactgttgtccacttattcatctttttcttttaatttctgggggacttttcagatgtaacttcaaagtaatttttttctgctattaaatttttaatttttaagaggttttaaaattctctgattttttttaaattacaaaatatttcataaattaaaaaagtatatataaaacatgttatataagatataataaagaataaacaaatacacatgtaccctactcctcaacttgagacaaagaacataaaacaaatgggtcctttatctttctccatgcatctccttcctcccctcccaccccaggcaaccagaatcctgattttcatgtttattattttatttaaaaaagtttcactcatctaaattcccaaataaggtaatatttagttttccacagttctgaacttaacagagtttgtgtttttcttttttttcttttcttttttttttttttgagactgagtctcaatccgtcacccgggctagcgtgcaatggcacagtcacggctcattgcagcgttgacctcctgggcttaggcagtcctcctgcctcagctgggaatacaggtgtgtaccatcacatctggctagtttttttttttttttttttttttttttggtagaaataaggtttcattatgttgcccaggctggtctcttttccctttatttatgatgccctaaattaaaaaaatttttcttcaaacatgaacagaaaggtactgaactcctatgtacccatcacttagtttcagcagttatcactcagccaatcttgtttcatctgtactactcctcccccagttggattatttaggcttgtgtcactgatgtcattcgtctgtaaatatttcagtatctacttttgaagtataaagattttacaaaaatatccacaatatatagtgagttaattgtagtttgaatcttgtttaggaaaatttcttactgtgatgctataaaagtattcttttttattttctcctaaaatcttaaaattttaatctcttataattaagtccctaatccaaatgaaagttgtctcaataacatttactgaatagttcattctttttccattgatctgccataccatttctgacatgtattaaataatgctgcagcagatgtcttgtacatgtctgttaggctcttgtgtggatttctcttgggtatatacataggaatagaattgctgggttatatgttatatgtatctttaatttcagtagataataccaatctgttttccaaagttgatatactaatttacactctcatagtatacaatagttcctgttgctcctagccagtgctgatgtggtctgacttttaaacttttgtaaatttggtagatgtcaagtaccacctccgtgtagttttttttgctttttgtttttttagagacagagtcttactctgtcacccaggctggagtacatcggccgatcatagctcactgtaaccttgaactcctgggctcaagcgatcctcctgcctcagcctcctaagtagctgggactacaggcatgcaccaccatggctggctaagttttatctatttttttttggtagagttgttatctccttatgttgcccaagctggttttgaactcctgacctcaagtgatcctcctgttttggactccctaagtgttgagattacaggcgtgagccactgtgcctggcctccttgtagttttaaagtgcatttccctgattattaatgaggctaaataccttttcatttatttattgggtatttggatgactgatttaaaagaaagtaactgggcaagttccttgcctgtttttaaaatagtttttggtcttttgttgatttgtaggagttctttattatgggtatgagctttttgtcagttacatgttttgcaaagatcttctcccactccattagttgctcattcattctcttaatggtatcttttgatgagagatatttgattttaatgtcaaatatatcagtgtttttctgagtcctatttaataagtttttcatactgtgagattctgagggttttcctatgttacataatcttctaggccagagttgctttaagtttttttgtgctgtgtattcctttgcaaatctagtgaagcctataataactttcctcgtagtatgatgtttttaaatgcataaaataaaatacgtagcattacaaaagaaattattgaaatacagcttcaagatattaaaaaatacgtttgtgatagagacattatgtacttttaaattaatgcattcggtaacaaaaattgcacttaaaatatgggcagttttaattgtgtttagctattgtatgtggaattaaaatttcagtatctcactttctaaggtgagggtaggctttccaagaacaacaaaattcactgaaggctttttgggttgatctctagttgtagaaacgttaaattttactgttttattgctcagcagttagttggcacagaggtagttgcttaacggttgcatgaacaatatagacaggaagactgcaatcatgtgcggtttagtagtagttccaataactaacaatttcaaagtagaaatgagtgtaaaaaatactttgaaatatgcagtaactgtcatgtgatatgaaaacatctttgattctgttagagacaaaatcatatgtactgccaatactactttgtttttttcaattagcatttatgaaaatagagaagtaattgtttttccccattaaggttcatgatgcctttgggtcttagttttcttggtttcttcagaagcagaccctgagataaggattcaagtgtaagtaattaatatggggaatgatcacacgaaatatactggattggaaggagggaagtgaaggcacttaataacctttattaagtgtattaagaagcttgaatctctgggtcctctgggaacccgtgttcctcacttgcatcgtgttccttacacatgttctttacacacatcatttgaaggcaggtgagggccaggcatcagttctcagcactcataaccagctcctagaagacctcagacaaaaagatgtagatgcttgcagttgaaactggcacaccaaaatgctaaggcatgatgggatacaaatgatgtgtcaaaagtatcttttatatcttgaagtctatccacaggacctttgggtcagaggacctcaggccaagagcctctggtctagaatatggacattttatgttttatctttcacattcaggtctaaaatctatgtgaaataatgtttagatgtgatttgaagaaggtcaagttttattttttccttatggatatctggttgtcttgaacaatttattggaaaaaatcttccctttcttcattgttctgcattaccacttttgtcataaaatcaaatgtccatatttctgtaggtctgtttctaggctcttttctctagttcattggtctttccttgtatgagtgtcacctgacttaattgctatagctttaaattaagtcttgatatctggtagggcaagtcctcccctcttgtttttcttttttaagatcgtcttatctattcttggccctttgcatttctatataaattttagaataaatgataatttttacaaagcaaacagaaaacctcttatgattctgattggtattacattgactgtgtaggtcagtttggggagaattgacatctttactataattagtcttcccgtttatgaacatgatgtatccatttattttagacctttttttcctcagtaatgttttataattttatctgtgaagatcccaaatatcttttgggattaattcctagatatttgatgtttttgatactgttataaatggaatcatcatgtaaatttttaaaaaataattgttactggtatatagaaatgcagtttttgtatattggctttatgcccagcacccttactaaactcattaattctaataattcatctgtagatcattttggattttatatgtacacaattatataatctatgaataatgaaagctgtagttcatcttttgtaactctcccatttttcatatttttccttttttttttaactgcagtgtctaggacctctagcagagtgctgaataaacgtggtgacaacaggtctatctttttcttgttcccagtctcaaagggatacccttcactgtgtcatcataaatataatgtttactgttgatgtttgtggtagatacttttttttcagataaagaaactttccttctatttgttgtttgctagattgtttttctaaaccacaaacgatatagaattttaggaagcattttttctgcatctaatgagacaatttttatcttttttttttggagacagaatctcgctctgtcacccaggctggagtccagtggcacaatctcagctcactgcaatctcagcttcccaggttcaagtatttctcccatttcagcttcccaagtagctgggactacaggcacccatcaccatgccggttaatttttgtatttttggtagagatgaagtttcaccattttgtccaggctggtctcgaactcctgacctcagatgatccacctgcctcggcctcccatactgctgggattacaggcatgagccactgtgcccggccatctttttaattttttaataagatgaaatacatggactgattttgtaaaccttgtattcctggaacaatcccaacttcattataatgtgttatccttgctggatttgatctgctgatctttttttttttttttttcttttttttttttgagacagtgtctcgctctgtcacccagggtggagtgcagtggcgcgatctcggctcactgcaagctctgcctcctgggttcacgccattctcctgcctcagcctcccaagtagctgggactacaggcgcccgccaccacgcccagctaattttttgtatttttagtagagacggggtttcaccgtgttagccaggatggtctcgatctcctgacctcgtgatccacctgccttggcctcccaaagtgctgggattacaggcgtgagccaccgcgcccggcctgatctgctgatcttttgtttaagatttatgtgttagagtgagattcggccaataattttcccgttttcataatgtccttgacagatttttatgttgatgttatgctggccttataaatgggttggaaagctctcttttgtgaagagtttatgtaagattgatatagttttattcttaagtatttgctggtgaagccatctggatcaggaattttctttgtaggattcagttttttaaattattcagattttctttttcttttgtatgtcagttttggtaagttgtatttacctatgatttttcagttttatttagattttcaaatttattagcacaaaattgtgtaaaacaccttatcttttaatatctataatacatgtatagtgatttcttcttcagttttgatattatttatgccttccctctttcttcattcatctcaccaagagtttatcaattttgtaggtctttttactgccctaaaagtcttctgtactctgcctgtttttaactctggctacccctgcttagttgttactgttatcttttctacttttaaatgttggagtgcccagggctcttctagtcttaagatttctgatgccatttaaatgccatttttgtatgctgatgacattcaactttgtattttttgcctgtacctcttccctgatctctacttccctaacccctcaatctactccctgatggctcacctttagaatatatccacaatctgcttacttctttaccacctccactcttataatctggttgaagccaccattatttatcacttgtattattgtattaaatttttaattggtttcccaatttttgctgcacttctgtacaatctatgttcaaaccagcaggtggagtgatttaaaaaattgtttttttgagacagagtctctcactgtcgcctaggctggagtgctgtggcgcaatcttggctcactgcaacctctgcctcctgggttcaagcaattcttgtgcctcagcctcccaagtgactgggattacaagcgtgtgccaccacacctggctaatttttgtatttttagtagagacggagtttcgtcatgatggccaggctggtctcgaactcctggcctcaagtgatctgcccaccttggtctcccaaagtgctgggattatgggtgtgagccactgttcctggcctggagtgatctttttaaaatgttgtcagatcttgtcactcttcttttgtacaaaaccgtcaaaagcttttccatttcatttaccaaaagaccaagtcttcgtgatggtttagcatgctccatgcttaccaggactctcgtcactgcttcaacctcatcttctgctaactctcacccctgcacactccactccatctaatttgcctcattgtttttaaactagattttaaaaataaaacactgaaattttgataagccagttcaataatctacaaataataaaacagtatttctggatagaaatgtagagacacgtgaagaattttctgtaatgtcttgagaagcgtgggtatctcatgaagggtacacttgtcagaatcactggaaaaacagtttgagaaataatataattcatgtctttttttcctttttaattttattttacgtaattcatgtcttgatctctaaaacaggcagtcacctttaaaactttggatctttaaaaacaaataccccattactcctaaaatttgactgaaaaaactcacagatttgtcttttttttgttactcatatttcttaggattaccacgttaataagtgattaataaagccagtcattcctttgacttaacaaatccataataggtgaacctatggatgatttaatataggaccagttcagcatgtcagagagctgctggagagtcatactggaatccagctttatgatattcccagttaatcattgctgatgtcagcttggatattgtacacactgtgcatcatttggagcatgttttcctattgcctccttttaaatatcgttaatggcactatgatcatggataggtattgtatacacttaagttttccttgactcatgtacagttaacccttgaacaacatggcagttaggtgatccaaccccctgcacagtcaaaaatccctgtctaacttttgagtctccagaaacttaattactaatagtctactattgactggaagcttttccaataaaataaacaataaattaacacattttgtatgttataggtattgtatactctactctttttttttttttaaaccctgcatgtggcatccaatatgtgctatactcttttaaggaagagaagaaaaatgttactaagaaaaccttaaggaagagaaaataaattaaccgttcattaagtggatgtagatggtcataaggtcttcatcctcatcattttcacatttagtaggtgagagaggaggaagaagaggaggggttggtcttgctgtcttgggtggcagaggcagaagaaaattcacgtgtaagtggacctgtgcagttcaaacccatgttattgaagggtcaactgtactttaacatatatattgtttgatttttttttatcatataacggggcaaagaaaatgcattttagaattctagcaatctgcacttgtgagacacatgagaatcttttatagttgtattcatatcataatagactttatatacgtaaaattgatagtgcattttggacaaaaagttgatttgaaattatatctgaaattaacaaccttcattcacatgtttagcagatattcttttgaacaccaccatataccctgaactgttgtgtgtgctggcagtcttatgatgaagatgatagacaaggcttttgttcttataggacttaatttctggtgaggaaagacagaaaaaaatatcaagtattaacaagtgctgtccagaaaattaagacaggatgatatagtagtgtgattgggtgtctgttagagtgagtgatctatagagaaagctttgctgaggagataacctttaaactgagaattgaatactacgaaggagacaactgtgaagttcaggggaaagagtgtttttggccaagggaacaaacaccaagtgcaaatgctctgaaataggaattagcagggcttgttaaagagcaacagaaagctggagtgtagtggttagaccaaagtttgagatgcatctgagttaacatatcagataggataagacagtcaggagttctctggcaatttgaattctttagccaaaggcggtgtttaaagttatgggtctggatgaaattaactagggagaacgtgtgtattagagaagagaatgggactcaggatcaaatcccaggatcctcaaacattaagaaatgatagagagaggggagatacctacaaaggatgctgggaaggagtaaccactgaaataaaacgaaaaccaggagaatgtgacattagagaagccaagaaaaaaggttcaaggagggaatgtcagttaattttgtcaaaagacctagaacacatgggagaacagttaaacatctgtagatagtacaggcctaactgtgcgtaaattaaagcaaagaaacttttgtggaatcataaagttttaatgatcttagtgatcacagaagcagctaaggtttttgaagtccatgtctctgccctccactgccactacctgtgtcagcatcttcggggctgcagacctttacagtagtctcttaagtgatgtcctgcaaacatcctctgattggtctgcccacaggagccagccacctgaacatgccgttctccttttcaccaccttttaatgactcctattgctcctaaaatgaagattatgatctttaccatggcctgtgaggctctgctgtatgatctggcccttccgtgcctctccagcttcattcccaccttaatgcctacgacactgatgtcctttcaaggccttgaatatgccaagctctttcctgcttccacgtctttttatgtgctgttccctctgtctagggaatacctacaatacccagacttccttattctttacctggtcgtcttttatgtatccttcaactctcagtttaaataccacttgcttaagaaatcctctgatctcccaggcaaggtcaagtctccttattaaatactttcctggtgccctctgcttctttcttatagtgcttatcacaattgtaattaaaacaataatttatatccttacttaatgttgccttcctttctaaagaataagctctgtgggattaggaaatgtattttattatttctgtctcttcctctgcctcagctatatccccagccattcacatagtggcttctttcaataaatacttgttgtttgagtaaatcttgtaaatgttccatagttgtacaggcagttaatggcacatcatcattatctattagtacgttgaggactgattttgtttttaagcctgagaatggttggaaagcccttgagtttgcttagagtgaaatgtggctctttaataaatctgtatctggacataatcaaatgtataataattggttcttatgaaacatagtaaaatatatgtaattagattgaattaagaatagtagcttgatacaaactacaggatgcctacccttccctgaaagagacatatgaactgttaaaatttccacaaaaattttattttctagattattgagtattattttcattgtgttagtcacgtctccctaagctgcttatatccagttatcctaagagttaagtgtttcataattcttatggaaagataatgcttttctggtaaggatcctatggaggttaagcaaatgtgtcttggattgaaaaagctattttctcacatttttgagaatataccacatctgattaagattatcctgataaaaagaacagaaagtaactttggaatgttgggcagtttttttttttttggtacaatctgttctgcttctgttaataaagccaaatttgaattgataaaacagatggtcactgtggatctcccactagaaggcattttccaccgcctctgctacacatgacagggttttatttcaggtgttgtgagactcaaattcaattacttccaggatttttaatattacggtccattgagcactttggctggtaagatctattttttataaatgtggtaaattaaatttttcttaggcttaagagtattttaaatttctatctgaacttaaaataaagccttacttactaaagagccttttctacccaacgtgacatacctgattaaatctttagtttaagaattggttttctctggttcgcttactaggagatgtttgctgaaattctattcgtttatgttcataaagtttgtattggaacattttaaaaaataacacttggttattttgtaaaatttgcaagtaatttaaagtatcctgttttcttcaaaaaatggaatttatcttttctttttttgagttctcatgcagcatggtgaatatagttagtgatagaatagtgtatattttaaaattgctaagagtaaatttcaagtcttctcaccataaaaaacattaagtatttgaggtgatggatatgttacctagcttgatgtaattatcatgttatattcgtgaattataacatcacttcatactatgtaaatgtatacaattataagttgtcaatttataattaaaaaggcagcattttctttgagagaagattatgcctttgagtgaaaaactgggttttgcaagggctaggatgagaagatttcttgaggggaagggttgtcccttctatgctgattttgctgagggttttaattataaagggatgctggattttgtcaagtgctttttctgcatctgttgagatgatcatttgattttgtttttaattctgtttatatggtgtatcatatgtattgacttgtgaatattaaaccatccctacaactctagtatgaaacttacttgatcatggtagacaatctttttgatatgctgttggattcagttagctagtattttgttatggatttttgcatctatattcatcagggatattggtctgtggtttcctttttttgtcatgtcctttcctggagtttctgcacagtaaatgaaacagtcagcagagtaaacagacagtccacagagtgggagaaaatcttcatgatctatacatctgacaaaggactaatatccagaatctataaggaactcaaacaaattagcaagaaaaaaccaaacaatcccatcaaaaaatggactgaggacatcaatagacaattctccaaggaggatatacaaatggctgacaagcatatgaaaaaatgctcaacgtcactaatgatcagggaaatgcaaaccaaaaccacaatgcgataccaccttactcctgcaagaatggccataatcaaaaaaccaaaaaataatagatgttggtggggatgtggtataaagggaacacttttacactgatgttgggaatgtaaactagtacaaccactatggaaaactctggaaattccttaaagaacaacagtagaactaccatttgatccagctatccacttctgggtatctatccagagaaaaagaagtcattatatgaaaaagatacttgcacatgcatgtttatagcagcacaatttgcagttgcaaaaatatagaaccagcccaaatgcccatcagtcaatgagtggataaagaaattgtggtatatatatatacacaccatggaatgctattcagccataaaaaggaatgaaatgacattcgcagcaacctggatggaattggagaccattattctaagtgaagtaactcaggaatggaaaaccaaacatcgtatgttctcactcataagtgggagctaagctatgaagatgcagaggcataagaatgatacaatggactttggggactagggaggaagggtgggaggagagtgagggataaaagactacaaattgggtacagtgtatactgcttgggcgatgggtgcaccaaaatcccacaaatcaccactgaagaacttattcatgtaaccaaacactacctgttcccccaaaacctatggagattaaataaataaataacacaaaaacactaaacaaaagtgaacttaaaaaaaaaagctaggaatttccctcatgcactcaggtaactgcaactcccccttttgatatgttgtactttcattttcattcatattttcaacatattttaaaatttcccctgtaatttagaagtttttagttttcaaatatttgggaattttctagataactttctgttactagttacttaattttgttgtggttttacagttttagacaataacagatgaaatagggactgcttcatttgagggggagattggtgggaatgggagaagggctagagtatcacctgctcctggggctctttgtatttccattgtgacttttgaggggctctcgggtacctgtagaatttctttgttacgtagtctgaaaccactgcatagaatgtgctgtaaatttgattatgtgaaaatgatgctatgctgaagaagatacttggaggaaagcaactagtacattgttaagtggctgtctaagggcaaacacttaaaagatttgctgtataattaaaatatccaaaaaaagagacattaatggaaatttttgtttcattatgcagcacaaattgagaatgagtaccaagatgaaaaaaacagaattgtttgtctagtccaaatgaaaatatttgggtcaatgcatacttttcaggaatacataattgcagaattcctcagaggttatatttttgcataagcgataacatttattatttccctttaatgcagtttttattattggttataaagcactataaaagatagtttctgttaaaatacagttgtttagcctttaactaaattgttaggactaagtaaaatgattaagtcagtgcctattgttatacttgtaaatattttaagtgggcattgaggtggttcctgacagctacctccatgcattctttatcatcacttagagtagggatcggagaactgtggcccaagagctaagaatgttttttacctttttaaagggatgtaagaaaaaaagaagaatctgtgtcatagacctgtgtagcccacaaagcctaacttatttaccatctggccctttgcagaaaaatttgctgactcttgatatagagcaagaaacaattcatgttcgtgaggtgaagggtgaagggcttcactgttaaagaccacttcaaaaaggaaaggataacaatgactgaaaagatagcatggatctttctaattctttcttaactaacttattcaaggggctagcatcagaatcttttttctgtactgaccaatttatgtctaaatgggagaatttggcatcagtctgcatttgaaaaacaatatcacacagaaaagattgataatgaatagactgttcatttatttttcaagaatagttttctttaaagtaatgtaattttgagataagttttgtattatgtataagtcacatattagtttttagatgtaacttaatttttaaaacttcttcaaaccacttaaattttgaattgtgtatgtacaaattaattttatattgacctatgtatttttcaggatgattgtcttttgaaagtgtggtatcctatgactggttggaagtcttcaattatacctcaggatcatcatgaagtaaaaaggagacagtcctctactcaattttcttttgtttacttggcacatccccgagctgtgacaggtttttcgtggcgcaaaactagcaagtatatgcccaggttagatgaatgaatcatgtagctttagtttgcatccttaaatgtttataaaaataatgaaaataaagtccttttatttacatggtggcaattaatagcataggctctggcatcaagctgcctgaaatcaaatcctactattagcttcatgagtttttgactaaatttcttaagctgtctatgcctcagtttttctctgtagagtgagggtagtaatagtacctacctcagagagttactgtgaaactaaaatgtagtttgtgggtgggaagtgcttagtacaggcctttgcacatactttgtgtccagccaatgaaattgttggtagtagctgtggtactagcagatcctagcaagaaaatgtttgcaaataacaggaaagcacacattgaagggaaatagatcagtattatgtcaattatgtatatggtgttaaagcatataatgtactctgaaaaaagtggccaggttgtgttttttttgttgttgtttttttaaatctgagagctgtcaacagaagcttctcaaaggattttttattatacattttttcctcatcattgtggcacctcttaaaggtatttagaagattaaataaactgcaaaaaagcttatacaaatgattcctttattatatacaggtctaagaaagctgttgggcactcagaagcttgcttagaaatctagtttgttcttgagggagggttattttacctactaaatatatctgaggattgtttatgcctgataggaaatatagcacacattgtagagatgctcagtaaatgataatgtgggaaatttatatactttttgaatctaaatatattctgcttaagtcatctgcatctatttgcagaatacttttgacttagattctgtgtgagcatttttttaaagggagaatgatttttttgttcctttgtaacaaacaggtaagttactttagctgctccatgccatgccgtttttgcttattttaacttaatggaaatggatttatagtttgaaattatattctccttacagttttatgatgaagataattatttgtttgtaactgtttgggttataggaaggaggatgtaaagtgatgaaactactgccataagccagatagtttaattacatttaatgatcttttattatggtcattctctaatttgcaatgattaggttttcttttgctgtttagtttgtatgttttgtttaggagatactaataatcctctagagcctgaatgtataatctggcagtaatttctgtttcttttttcaaaacaatttcccggttcttatgatgttcacagtgatgctatatatgatttcaagctctttgattgattccttttttccatagtgttttgcactaatgttatctttatgcatgaagaaccaaaatattaattagttaatgggattgatattcacattaacctttatttatttctctttgttgttaggggttctgtctgtaatgtgttgttaacttcatgtcatgatggtgtgtgccggctctgggcagaaactttattaccagaagactgtcttttgggtgagcagatttgtgagactaccacttccagcattgccagcagcctttctcatgctggaagacacaaagacagaatacagcatgctcttgaggtattatattatttaaaatggtaaatgaattttgaagataatgtgagcctggtggaaattcatgaactaacatgcagatggcacacatggtacatgtaatgagtgaaattaatagcaataaactctcatttatgcttgtaagactactcatttattccactaagaagccaaatgcagaaattaatgatctcagacatgttttataggtaaatattattaaaagttttttaaaaattgatattttatgctcaagttctagataatattattttaattcttttgttttgcatgtcacatgtgaaaatctatgggactaagtattagtaaaatatgtaaagatccttgaaattagttgtaattaaaaatattttgcttttgtttcataaagattaaaatcttattgttctagttaaaaatgactattttgttccttaagaataaagatgtttattaagatattagacacaaatgaactgctttggagtttccatgattgaagattttgaaaatgaaataatttttataatttttaaatacagtatgaaataaaagtgctttataagaaattacgttataacacatagcacaaatgattgtgtcccatatgattaggtaatacaatgagatatatgcattattttgaattgtcagaaatttattatagtaaacttagattactatttttcttgtggctgttttttattattcaaatactgtatgcttattctagaattggattaagaaaaggagaagaaatacggaatttataattcaactattctagtcctgtgaatatgtgtatttttctttatacgattgagatcatattatgcagtaatactttataagttttttatacttaatttgtttacagtctacattattgactatacttttacattatatatttacattgacagtttaaaggttgcatagtcaaagtggctttgccattttaccaagcagaaatattatacaactttgacaagttaaggatgtggtccttaaaagttttatgtgaagtaggcctcctcaggtattgtctgtattgggccattcttgcactgctatgaagaaacgtctgaaactgggtgatttataatgaaaagaggtttaattggctcatggtcctataggaagcatggcaccagaatctggttggcttctagggaggccacagggatcttttacccatggcagaaggtgaagcaggagccggcacatcacatggtggaagcaggaacaagagagagttgcggggaggtgccacacatttttaaatgaccaaatcttatgagaactcactcgctattgcaaaggcaataccaacaccaagccatgcgggatccgcctcatgacccaaacagctcccaccaggctctacctccaacattggggattacaattcaacatgagatttaggcagggtcaagtatctaaactatatcactgtctgtgattgggcgctatttttacatttttttcaatatttaaaatgtaagtgaaattaaaagcagatgtcaaaacagttaaagttatcttttattttgatattgatatttagtaggacaaagtacttaatttttaagtagatatttgtgatcacttacttatacttatgtaacgtgttttatcttcaaattatatatgagcctttggaaactaagggcttttagacatctttgtatcctccatggtacctgatatattgcttttcaagtgtttgttaaattgaattattgccatgtaaaatagaacagaaatataagtaaatatgtaaccagtgatttgacaagtttttactgtcttttattaatattattaattaatatgttaagatagtttttaaaagaaaaaacgtaattgtctgacttacgagccacttggctttctgacatcctatcctttcctatggaactccttactgttagttctatataattgtatatattcttaagttatatgttttgtttctaggagaaaatagccagtattagatcagtcttgtcagtctaatttaaaatgatggttaatgtcaaagatccagtgaaaataatttgataggcagttttgaccaggggttctctaatgtcaatcttaaccctattatcaaagcaatgagcaaccccgtagtgggagaccagaggtgggggacacaccattgacctgatactgttttccatatgcaaaatgagaagggctgtagaaattgagaggatgtgccagttatgttactttaatgaagaaagaattgataacattttatactttatttaattgaatgtggggaacaaaggaaagtaataaaaaattattatgaaacatggtcttcggagtgggttaagttacagaataaggaattactgtgaggtggggccgtgatatggagaaaaaagataatgccaagaatgacatggccccatgactaaaatagtccacatgatcacgcatgctaatgaagaattttaatcatatagatttatctctatttaaacatatccaaattgcaaattgtttaaaacaatttaaacaaattaaagatcaacattttaatgaggtctttccttgtctactcctatctaagtaggttccccttgttattctgtattttcataccctgttttgttctttgtaatagatatcatgaatttgattgtttagctggctgtttaattctaagtgagaggcagtattggggaggcaatattcttcctggtaggaagactcaggaattttttttttttactcttatgactagaaaattctgtctcagtactaggatatcctgaaaaaaaaatctttggacctcctaatattaacgggaatctttattcatgttttatagataccatgaataagtatttttgcacactgctttttgccttgaactaaaagtttacaagaactgtagagaatacatccaaaatagttctactgtaatttaaaaagtttcctttaaaatgatcaggtttttatggagaaaaaaatcttaaacctcttaataattaagagtactttggttggcatttattagaggttccagagttggactcagcaactatttttctattttagacaatacaccatttgaaaaatttaaggaaaggacagaggaggtcatctgttcttgtaactcatgctgaattaatgcccgaccagacagcaatgcatgaagttcaaagacacatttcccaccatgcaaatgcactctgtcattttcatattgcagcaagcatcaaccctgccacaggtaaaggataaagttttatttcccataaatatgttgaagtcaggtaaataaatagaaaagtggaactactttcataacctgttttttattatttcatgttgcctttaaaatacttaattggagtagagatataatataaagtaccattttttgaattgggcctatgtgattgggactatgtgattctcagggtattaacttcagtaactatttctgagcatctttgtctagactataacaagcattcctagtaaattagagctgtgattgaacctggtatcacaagtggtggcagcctggtaaattagtgtaatttctctcacttcacagtttaaatcttcccaactcttctttataacctcctctaaatatatttttacaaagttttccttatatctcagcatatcttgttttctacccttgtagactttcttgtcctatactaaggaaaacacttttccttctaacctgaatattttcttttccctttttcccctatgtgactgagaagtattttgaggcaggttctgtgttggcaaatgcatatttgagagcttctatttaaaggcaatatgttttccttctacatggaaatgtaggagaaaggctataaattttatattacattgctcatagaactatataaagttttatataaagttatagttgtatgttattgaactggaggtctgttgcttcagagtgaaggggcttttatttttaaatgtttctgtatgtaaatacagtatttagtaaatagaattctaaaagggtgatctgcagtggtaactctagatatgtgctgttttatagagtagccactggccccgtattagctatttgagcacttgaaatgtggctggtccaaattgagatatgctgtaaaatacacactgaatttctaagacttagtataaaaaataatgaaaaatatttcataaataattttatttcatattgattacttgttgaaatactattttatatatgttgagtcaaataaagtatattattaaaattactattacctgtttcattttaccttttgtaacgtggctattgaaatatctaaaattacttaacatgtcttgcatttttggtctgcattatatttctgttgggcagtgctttgccatctgattaaatgttgttttgcttatattatcctttcttatctaatatcttaattgtattctaagaatgtctttataatttgttttcaaaatgtggttttagatttttatgaatttttaacctttttaaaagaaccgtttcttgaattactgtgataaaaattcaacttcaaaacaaaatgcaattcgtgatagtctgcactaaattcaatacatattagaaaccttggctttttaactgtgtacactatcctaattagatggaataggatcacagaggatgagcattctgtcacatcatttgagcctaaggactggatatgttcttgtagccattgggccttggtcttccccatcttctttactaaccttcactaattttatccatgctcatcctaacttacctacatattattttaaaaacaattttgttaaaaatgtttaacatcatgcatttttagttactgcatgtaaatataacatttaggttgaccaaatagattactaaatgcaaataattttatattgttaggacttgtcctcttcacttttttttcaaaaaattttttgaaactacaagaaagttgaaagaatagtacagcaaatatccatataccacttaccgagatttaccacatattaacatcttgtcatttattcttttgttctcctcctctgcctgtatagatatgtctttgctgcctcttcccttatttttgacggaaccatttgaaagtaaagttgttgattacaataccctaaatataccctaattatcctaaatattttccattacctaaatatttaagaatgtatcttttagtaaaaagggaatttgcctccatagctgtaatactgttattgcatgtgaggaacatagataaaataatatcatgtaatataccattcatatacaaatatagattcctttcttaaatgcagattattttctttaaattcctccaatctagaacagtccctttctcaattgtcaaaaaaaaatctgttagtctcaaaaagttgtctctcagttttctttcaaaatgtctcacagtctgaatatttgttaataagatttaggtttaacattctgagcaagattactacataggcacataggtgatgtagtgttttataggattgctaattcacaaatcctattttatatgatttatttcatttttatcacaaaaccagaatagtcatccaggaactggaaagaaagaacaaattagagcatttaacattcatatttattgtaatagaacattaccagaatgtccatgcattttatctttagattttcacttctttttgcaaaggacaatttttccttctgttgaatgaattatttataatatggattgaaattaaggagattaagtttttgatttataccattttttgggcggaggaggacagggtcttgctgtgtcacccaggctagagtgcagccttgacctctccggctcaggcaatcctaccacctcagcctcctgagtagctgggaccacaggtgtgtgccactacacctggctaatttttgtagtttttgtagagtcagtgtctcgctgtgtttcccaggctggtcccaaactcctaagttcaagcgatcctcccgccttggccttcagaagtgctaggattacagacatgagccaccacacctggccaatttatactctcttacatgaactcatcaatttcataaatttcagttacctcaaatggagaaattatcttatacttagaattttgcctgccttcttgtgtttttttcttgattttatttcccaacagctatttagtaaagtttcaaacactgagaaaagttggaagaatagtacagttaatacttttatattcttcactttgattcaacagttgttaacattttgccacagttgctttatatgtggcaaatgtctctgtgtgtatgtgtatgaaatgttttcttttctctttctttctttcttcctttttttttttggaaacggagtcttgctctgtcacacaggctggagtgcagtggagtgatctcagctcattgcaacctctacctcccgggttcaagcaattctcctgcttaagcctcccaagtagatgggactacaggcacaccccgccacactgggctaattttttgtattttagtagagatggggcttcaccgtgttgcccaggctggtctcgatctcctgagctcaggcaatccacccgcctctccctcccaaaatgctaggattacaggcatgagtcaccgcacatggtcgaaatgttttcttagtcttttcaaagtaagttacacctatcatggtgtatcacccttacattagcaagtatctcctaaaattctctcacataatcataatatcatcatacctaagaaaatgataagtaattccataatatctaatatccagttcatatttaaacttctctagttatctcttttatagctgcttttctgctttaatttttcatcccctgtccccaaactggaattcactgaaggttgatgcattcgtgtattttgtttttaagttaatagtttaatttcatatgtctatcattaattcttaagatttacatttaccattaaattcagttaaagtttttacaaatgctgctaaaattatgttgacttgtttagcaccttttctttatatagattagtcattgtaagcacttgtcatgtttttaaagaaataaaaaaaattatattgaaatctcttttatttccacagatattccaaatgtcttggttggcactgcatttaatgttgatgatggaaatgggggctttgtagttcattggttaaacaacaaggaatttcattttacatcatctacagaagtatttatgcatcaattacgaaaactttctgataagcaggtagatcatgaaaatgatgatgcagatagagaagatgaggaacattcacaggaggatagagaacggggtttacatatgaaattagaccatggttagtatcctgtgttcagattttacttactccaaagttaacagctttctgtggtaccacttttagttttgaattcttccttcccgctcttcctcctttttacttttctatttgttacacaagtatttactgaccatctgccttggatcaggtactctgctagcccctgcaaacatcatctaactctatatgttctttggaagccatatccttttctggggaacaggttttgctaaatggtagtaataatgatagggtgaatgaagttttaatttatctaaaagtagtaactgtagtaacattcaattcagacaaaagtttcctttgtttttttttctgactgtaaattggaaaagagatttagtttttaaagatagtatgccatttatttatagtctagtatgtaaatgaattatttaatgcttgtattgataaatatattttctggttcagatttatccctggatagagaatctgaggcaggtacaggatcatcagaacatgaagatggagaaagagaaggaagtcctagaacttactcacgacttagtgtaccaatgccactgcctacggttctgcttgatcggaagattgaaacgctgctaactgaatggaataagaatcctgatatgctttttacaatacaccctgtagatggtacctttctagtgtggcatgtgaagtatttggatgaatataatcctggaatatttagacaagttcaggtatattttattgatgaaatagttattacatttcttaaaatagtaaaaagaaataaatgctttgtagagttagcatgtttttagaattactgaaaattttggttttgataagcatctgagtaaagaatacttctttctttcagaagggatcagtgaccataagcttagcaaacttgattagttagaagataatgaatttggccttgaaatgcagtactgaatatttaaatatatgtgttgatttttgagggaattaataatattttgaataagattaagaaactaccctgaaaatgtgaatcaggatgagctcctccttgtggccaatttgatgagctaaacgaagctgcctttgtcatctctctcaactttattgctatttagatctgtggctgtggtcattttgttgtacaagcaaagcacttgaactttttttcttcagccttctcttaggccatgaatagagatatggtattacctaaatagagcaaggggactggaccataaagaggttgaaaatgacattttttgataagaagctgagatttggtattttgagaatagaagtcttttttttgagaggaggtaaactatttgcactgaatcatataattatgtttttcaggtttctttttcttctcggattcctgttgcatttccctctggtgatgcaagctctcttagtaaaaatatcatgatgtatgcctgtataaatgcgacaaaagattctcaccacacgctgttacaccaggaggggatgtctgtaggcagtcctcacggatcacagccacactctagatcccacagtacacatatgaacatcttagctcccacagtaatgatgatctctaaacacatagatggttctttaaatcagtgggcagtcacttttgctgataagtctgcctttaccactgttctaactgtatctcacaaatttagatattgcggtcatcgatttcacctcaatgacctggcatgtcattcagttttaccactgttattgacatcctctcatcataatgctctattgactcctgaattagattgtcagtgggactcagacaataaattaagtagattaatggaccctgtaaaacatataaaaggttcctcgaaacaacctcttagaaatgcagcaactcgtacatttcatgacccaaatgcaatctacagtgaacttattctgtggcgtgtagacccaataggacctttgtcatacactggaggagtatcagaattggctcgaattaactctttacatacctcagcgttctctaatgtggcttggcttccaactctcattcccagttactgtctaggtaagtgttcattgtaattgtgaaattaacacaagcttttaaactattatttgttatatacgaaatggtttatatttgttgtcattaagatttttaataagtattcagttttcattaaggtgatttttaataaatattcagaatacaggcatgagactgatttttagaacttccagaagtttttaaccttttctctcataatccattttttaattaaactttttgttaataattttgtatctacttattgtgcctgtttaattatgattctagaccatggttaagcctaaaaaaaatgtgaatacttgtttcttatcctttagccaataagaaaaatacactacatgtttagaacccagaggccttgttttcctttctcaggcacatactgcaattctgcaagtgcttgctttgttgcttctgatggcaaaaatctgagactctatcaagctgtagtggatgcaaggaaattattagatgaattgtcagacccagaatcttcagtaagtatttaataatctttattaatttatctaaggagataaagaattctcttttgactttgtctaggacctgtgtttgttagttgctgtttagggagtaagtatatgttctgggctgcatatgacatatatatgacacatttattttttcctaagctgtgttccaaggtacatgaatcaaaattttagtgtacataccacacattaatacattttacatgaaaagaaataaaaaggatttttttctaaaatattatttgtttgtaacatattttactctctagtttggttctgttagtcttactttgcttaaaagaagttttaaggcatctttaccaagctgtatgtttaggttggaaaattggaactttttcaagcttgattcaccattttaaaaaattctctggttagaatttgttatcagtgggtggcagcatctcattctgatagttctgtatctgagctggaagtcatatatgttagtatctagagttgaacagtagattttccatttacctataaaaacaactattctaataaaaatgtttccagtattgaaaaccaatgactatttttgagcatctactatgttctcctagatgtagagggaatacaaaatataagtttcagacctacctttaaggagcttttaatttagctgaagagagagcttattaataaaaagttaagtagcagtttaagacataagaagaggagtctaagggtggtatgtaattaattgccaaaaggatggccctagaagtgtttcattattcagaggagagagagagatcagattaaggtaggcatagaattctttattaaggacaatatttgggttcattcttgatgagtggataagatttagaaagataaattctttgtctttgcctgagtgagaaaattgcctggaagtaagtatagatacaggaaagtacatgtgtaaagcttgttccagaaacagtgagaaaaccatttggattggagcttaaggtttgacatagagaaagtctagaaaaatagaatcatagaactagaattggaagatattttaaaggtcacctggtctcaccagccatctgatgctttattcccctctgcttcattcctgccaatttgtcatctggccatcgatgagggagactcaactctaaatgcagctcattctatccttgaatagctcacacaatcatattgaaacgctatttgttttgtgtacattctacttgctagtgctagttctacttagaataaatctaatatttcttgcgtatgagagtacctcaagatattaaaagacagctttcttgtaacctgtgaaccttactacctcaggccaaatctgctccccctgtgcctatcaagtttctttatctgttttacatttgaccctggttactcttctgagcagttttcagtttgtctgtactctgagccttgtaggatgactaaaacatagcaatattgtgacctctctcattagatacatttatgttttgacagtcactccacattcttcgtatgtaattgactcatcatgagctgactgtcaatatcccgaagtctttccccctccctgctctctgctaaaccttgtcttctccattctgtatttgtacatttggatttggggtccaaatgtagacctatttttcctattacatttcatcttgctaagcacaactaaacagtccaatctctcagtatctttttgaatctggattatgttatttaatgtatttgtttttgctttatgactatgtcaccagcctgtttgaagagtgttatacctgcaccatctgagtcagttattaatatgataaataggcaggtctgaagaaagagcctagcagtatacatttgaaatctttctccattttcattttttggaatgttttccagcttgtttcaaggatttctgtgagacagcttgccatatactttgctgaaataaaatacagtctttctatcttctgcagtcaacgaagaaagtcaaagttacatgaggtgatttgttttaatatatgataggtgtaatgtgcacaccttgacatcacttggtgaccaaaacattgtactaggtagacattaagctccttggtctgccctgcagaagtatgttcttttcctttttgaaaatgggaatttttgcctgtttttagttttttgctattgatgtcattctccatgatttgggggattttgtgttttcttatggttctatttgttctccattatactcagtgttttgtttttggtggttcctcaaggttttataatatgcatctttaacctctcatagtctaccttcaaataataatatagtactcaaaatataatgtagccaggcacggtgactcacacctgtaatccaagcactttgggaatgagatgggaagattgcttgaccccatgagttcaagaccagcctgggcaacatagtgagacccccccatctctaaatatatacagtaaacaactttcaatagtgtccccaatctccctctcctgtggtcttcagcatgcatgtcctatgaatgttttgttaggtttatacataagtatttcatttattctactgactgtaaagggtgctgtctttttaatgttggtgtccatgtagttatggccagaatatacaaatacaattgaatatacaaatacaattgaattttgtatgtttatcttatatcctgtaacattgctgaatgcatatattaggtgtaggagtgtttttggtagatttcttggacttttccatgtagataatcatctcattataaatgggaacaattttatctcttcctttctaatctgtatggcttttatttttcttattttgttgcagtgactaaaacttccaactccatgttgaataagaagtgagattggatgttcttgccttcttcccatttttggaggaaaagcattcagtctttgatcattacatataatgttagttgcaggtttaaaaaatttttttaaaatttttgtgggtacatagtagatgtatatatttgtggggtacatgaaatgttttgatataggcatgcaattcttagtaatcaaataatggaaaatggggtatctatcaccgcatacatttatcctttgtgttacaaatgatctaattacactcttctagttatttttaaatgagcaattaaattattgactatagtcaccctgttgtgctatcaaatactaggtcttattaattctaactatttttttgtacacattaaccatccctacctccctgccaatcccttacgacccctcctagcctctggtaatcacccttctactctatctctatgggtccagttgttttgatttttagctcccataaataagtgaggacatgcaacgcttgtatttctgtgcctggcttatttcacttaaaataacgacctccagttccatccttgttgctgcaaaatgacggaatctcatttttttttttggccaagtagtactctgtcgtatgtaagtaccacattttttttttcttcatccattcatctgttgatggatacttaggttgcctccaaatcttggttgttttgaacagagctgcaacaaacatgggagtgcagatacctcttcagtataccaattttcgttcttttgggtatgtgcccagcagtggaattgctggattgtatggtaggtctattttagctttgtgagcaacctccatactgttctctatcatggttgtactaatttacattcccaccaatagcatatgagggttcccttttctccacatctatgccaacatttgttattgcctgtcttttggatataagccattttaactggggtgagatgatatcttattgtagttttgatttgcatttctctgatgatctgtgatattgggcaccttttcatatgtctgtttgccatttgtatgtcttcttttaagaaatatctgttcaaatgttttgcccattttttgatcagattactagattttttcctgtagagttgtttgagcttcttatatattctggttattaatcccgtttcagatgagtagtttgaagatattttctctcattctgtgggttgtctcttcaccttgctgattgtatcctatgctttttaacttgatgtgatcccatttgtgcatttttgctttggtttcctgtccttgtcatatattactcaggaaatgtttgctgagaccaatgtcctggaaagtttccccaatgttatcttgtagtagtttcatagtttgaggtcttagatttaaatctttaatccattttgatttgatttttgtatgcagttaatgataggggtctggttttattcttctgcatatggatatccagttttcctggcaccatttattgaagagactgtcttttctccattgtatattcttggcacctttgtcaaaaatgagttcactgtaggtgtgtggatttgtgtctgggttctcttttctgttccattgttctctgtgtgtgtttttatgccagtaccatgctgttttgattactgtaactctgcagtattatttgaagtcagataatatgatttttccagttttgttctttttgcttaggatagctttggctattctgggtcttttgtggttccatatgaattttaaatctttaaaaaatttctataaagaatgtcagtggtgtttttatagggattgcattgaatctgtagattgcttggggtagtgtggacattttaacaatatcagttcttccaatccatgagcatggaatatctttccattttttttgtcctcttcaatttctttcatcagtgttttacagttttcattatagagatctttcacttctttcatgaattcctaggttcttaatattatgtatggctattgtaaatgagattactttttgtttgcttgtttgtttttgagacggagtctctgtcacccaggctggagtgcagtggtgtgatctcagctcactgcaaccgctgcctcccaggttcaagtgattcttctgcctcagcctccagagtagctgggactacaggcatgtgccaccatgcccggctaattttttttttttttttttagtagagatggggtttcattgtgttagccaggatggtctcgatctcctgacctcgtgatctgctcgcctcagcctcccaaagtgctgggattacaggggtgagccactgtgcccagctgagattactttttcaaaatttctttttcagattttttgctgttggcctatagaaatgctactggtatttgtatgttgattgatatcctggaactttactgaatttatcaattctaatggtttttggtggagtctttaggtgtttccagatgtaagatcatgctttctgccaacaaggataatttgacttcttcctttccaatttggatgccttttatatctttcttttgtctgattgcctgagctggcactttccgtactacgttgaataacagtggtgaaagtgagcatccttattgtgttctagatcttagaggaaaggctttcagtttttccccattcggcatgatactagggtatagaaggtatgttccttctatacccactttttttagagttttcatcatgaagggctgttgaattttatcatgcttttttagcattaattgatgctaaaaaatttttgtccttcattctgttgtccttcattctgttgatgaaatgtatcacattgattgatttgtatgtgttgaaccatccttgtgtccctgttatgataaatgatcttttaatcattttaatcatattgttgaatttacttggtagtgttttgtttaggatttttgcatcaatattcatcagagttattgacctgtagtgttctttttttgatgtgtctttgtttggttttggtgtcaaggtaatacggcctcatagaatgagtttgaaagtattccttccttctctatttttcagaataattttagtgggattggtattcgttcctttttatatgtttggcagcattcagcagcaaaaccattgggtcctgggcttttctttacttagagactatttattatggctttgatcttgttacttgttttactgatctattcaggttttggacttcttttgtggtttagtcttgataggttgtatgtgtctaagaatttgtccatttcttgtagattttgcaatttattggcatatagttgatcatagtagccactgttgatcctttcaatttctttggcatcagttgtagtatcccttttttcatctctgattttatttatttgggtcttttctttctttttcttagtctgggaaaaaacttgtcaattttgttttatcttttcaaaaaattaactttttgttttattaatctttgtatgattttctttgtttcaatttaatttatgctctgatctttattatttcttttcctttaccaattttgggtttggtatgctcttgcttttctagttctttaagagtcatcgttaggttgtttatttgaagtcttccttgttttttgatgtaggcacttacagctataaacttccctcttttagtactgcttttgcagtatcccatagattttggtatgtcatgttttcattatcatttgtttcaagaaatttttcaattttctttttaatttcttcattgactcacttgtcattcaggagcatattgtttaatttccatatgttcgtatagtttccaaaattccttgttattgatttctagttttattccaatgtggtcagagaagatgcttgatattatttcatttcttaaaatgttttaagacttgttttgtgacctaacgtatggtctgtcctcgagaatgatccatgtgctgaggaaaagaatgtatattctgtagctgttggatgaaatgttctgtaaatatctattgtttttgatagtacagattaagtctgatgtttctttgttgattttctgtctagaagatatgtccaattctgagtgatgtcgaagtctcaagctatgattttattggggtctatctctttctgtaactctaatatttgcttgatatatctgggtgccccagtgttgggtgcatatacatttaaaattgttatattctcttgctgaattgaccccttcagcattatatagtgaccttctttgtctcttcttacagtttttgtcttgaaaactattttgtctgatacatagtatcagaaaataatgatactgatatcagtatatctgtctgatataagtatagctattcctgctcttttttggtttccattggcatggaatatcttttcccacctctttattttcagcctgtgtgtgtctttatgtgtgaagtgtgttttttgcaggccacagattattgaattttgtttacccattcagccactatatgtcttttgattggagaatttagtccatttagtccaagtaattagtaagtaaggacttactcctgccattttgttatttgtttctggttgttttgtggtcttccttctttatttccttcctgtgtttcttttagtgaagttgacttttgctggtggtgtgatttagttttttgctttttatttttggtgtattcactgtatgttttctaatttgaggttaccatgaagcttgcaaatattaccttacaacccattattttaagctaattatgacttaacactgtttgcataaataaacaagcaaaaagaaaactaataaaggctctactccttaactttgtcctgctacaactttttgttgttactatttgtatctttttgtaccatctgtatcttgaaaagttgtaattattatttttgattgattcatcatttagtctttctacttaagatcaatttacacaccacagttacagtgtaatattctgtgtttttctgtgtacttactattaccagtgagttttgtaccttcagatgacttcttttttttttttttggaggcagaatctcgctctttcacccagggtggagtgcagtggcaccatctcggctcactgcaacctctgcctcctgggtgcaagcaattatcctgcctcagcctcccgagtagctcactcgcacactgccacgcccagctaattttttgtattttagtagagacagggtttcaccgtgttgcccaggctgttcttgaactcctgaactcaggcaatctgccctcctcggcctcccaaagtgctaggattacaggcatgagccaccacgcctggcccagatgacttcttattgctcattaatgtcctcttttttctgatttaagaactcctgtaacatttcttgtatgacacgtctggtgttgatgaaatccctcagtttttgtctgtctgaaaaagtttttagttatccttcatgtttgaaggatatttttactagatacactcttctagggtaaatttttttttcttttcagcacttcaaatatgtcatgcctttctcctggcctataaggtttccactgaaattctgccgccagacgtattggagctccactgtatgttatttgtttcttttctcttgatgctgttgggatcctttctttatccttgacttttgggagtttgattattaaatgcctcgaggtagtcttctttgagttaagtctgcttggcgttctatagccttcttgtactcggatattgatgtctttctgtagtcttgggaatttccctgttactatccctttgaataaactttccacccctacctctttctttacctcctctttaaggtcagtgactcttagatttgcccttttgaggttattttctggatcctgtagatgtgcttcgttgttttttattcatttttcttttgtctcctctgtgtgttttcaaactcataaattatttcttctgcttcatcaattctgctattaaaagactctgatgcatttttcagtatgctagttgcattgtttagctccagaatttctgcttgattgtttttaattatttaaatttcttgttaaatttatctgatagaattctgaatttgttgtctgtgttatcttgaatttctttgagtttcctcaaaacagctattttgaattctctgtctggaggtcacatatctctgtttctccaggattggtctctggtaccttatttggttgatttggtgaggtcatgttttcctgaattgtcttgatagttgtagatgttctttggtgcatggacattgaggagttaggtatttgttgtaatcttcacagtctgagcttacttgtatctgtccttgggaaggctttccagatatttagaaggacttgggttttgtgatctaagctgtatctgctttggggggaccccaagcccattaatgctgtggttcttgcagactcttcgaggtactgccttgatggtcttggacaagatctggaagaattctctggattaccaggcagagactcttgttctcttcttttactttattcctaacaaactcccattctctctctccctctctctctccccccacccaccccccttctttctctctctctcccaccccctctctctccctctctctccttccccctccctctctctttctctctctcttttctgagccatctagagatgggagtggagtgtcacaagcacccctgtggccatcacctctaggactgtgctgggtcacacctgaagccagcacagcactggttcttgcccaaagcctgctgtaaccactccccagctaccacctatgttctctcaaagccctggggctcctgcagtctgcaggtagcaaagtcagccgggcctgtgtccttccctttagggtgacaagttccctcatacactgggctggtctagaagtaccatctgggaggtagggagcagagtcaataatcttagaaatctacctggtgttctattgtactgtggccgagctggtactcaaaccacaagacacagtccctcctacccttctctctcctttccaaaggcagacgagcttcaccctgtggccaccaggacttcaggcctacagggagtacttccagactactaccaatgttttcttaaggatcaggagctctttggttagcttgttgtaaatgctgcctagtctgagactcaccatttcagggcattgggctcccttctggcccacagaagatccagaaatgctgtaagagccaggtcctagaactggggactccaagagcctgcttggtgctctactcccttgtggccaagctggtacctaagatgcaagataaagttccctttacttttgcctctgcttctctccaattttaatatatgtgctgtcgaagcgagcacattgcccctccttttctctagcaggagtcttgccctgtagctaccatagctgggaatgtgccgagtctcacctcaagccagccagtctcagggtctcatccaagacccctggcacagtacctggatattgctgctggttattcagggcccagaggctcttcagttagcaggtgatgaatcctgccaggggtctttcccctcatggcagtggattcctttctggcccagggtgtgtctacaaatgtcgtgtgggaaatagggcctggaaagggagcctcatgactctgactggtgtcttatcctgctgtagctgagctggtatccaagatgcaaaacaaaatcctccccactcttctgtcgcctctcttcaagcagaaggaaggagtctcctttggagccgtgagttgtacagcctggggttagggaagggatgatgccagcacttttttagccatcccgcctggtgtctcagtaggttgcatgcctccccagcccactgtctttggcccagttcagccctaggactcatctaggagttgcagaccttgtggcctagattgcctttcaagtttatttaaggccccagagaacctgagccttgtggtggcaaggcttttggggaatcaagctcagacagataggatcagcgattcccctctgggtagggctccctccatgggtgagcgtcagctgagtttggtctggtttttctttctgctatataacaaggcagcactgacttcagtgctcacagttgcttgctcttcctttccccagtgcacagaaactctctcagcaccacgctgctgctgccagggtgtgggagaagagtggtgttggtgattcaagtgtgtgtttcctacctcttcagtgcttctttcagtgataatgaagttaaaactgggtactgtgaatgcttacctgatttttggttcttatgaaggtgctttttttcgtatagtggttaaattggtgttcttgcttgggggacgattgggggagccctctattctgccatcttcctctattcctacctccagctgttgggttatttgtagatactctttatcaagttgaggaatcaagaaaattaacaaacctagaggagaacttcctcatatgttttgatttcctttgagaatttctcttcgaccctcgattacttagaagtgtaagatttagcttccaagcgtcctgttactgatttctagtttgattccgtcatggtagaaaaatgtaccgtatgatttcagtcctttttagtttgttgaagtttgtttcatggcccaggacctggtctattttagtacatgttccactcactaagcacttaaaagaatgtgtattttgttgttattgggtagagtgttctatgaatgttaattaatcctgttttgattgatggtgttgttgagttcttctgtatctttactgattttctccctaatcattctatcaagtcttgagagcgaggtattgcagtctccaactatattgtgaatttgtctgtttctccttttacttctataagtttttgcttcacatagttttcagcactgttctttggtgtatatacatttagttcaaattcaaggtgttggcaaggccatgctctttctgatattcaaggggaggatccttccttgcctcttcctagattgctcctggcagtccttggtgttctttggcttgtagctgcatcactgtcttctcatggccttcgtccatctgagtgtctctgcgtatcctttttttgtaaggacagaagtcattagattttgcacctactgtaatccagtgtgacctttttttaaactagttatgtctgcaagaccctacgttcaaacaaggttacattccgagatgctgggtggacatgaattttgggaggacactatttaacccactactctgatcaactttcttttctcatcagttatatttgtagttgcatagtcaggaactttcaaagtctcttgagcctccagacttccttgagccattttgactttgagacccccatgctataaggcattctgggattttttaacctttctaaaatatagactatagagtcttgctcttattttcagtcttaaactcttaagatgacatgactactttctgtcacatttccattatttctgctcatcgttttgattttcttaatacaatagcagttctcctacttacttcttctactaattgtgaggcaaaatgtagcaagaatttgtcacatgctctcctattccttaaatgagatttttagtagatgacaagtaaaggctagctttttaaaaattttgtaacagatacttgaaagctataaatattgttctgtaggtagaggggtagatttaggaagcacaggaagggaaataaagtgattaacttgcagggtagagtagaattggtaggtactggaagcatggagatagcagggagtctgttgaggccaactaagcatgtgggaaaacaaacctgatctaaagtgggatttcatagtctaggaaaggagaagagcagagcttagtagctgcttgaatatggatatgaaaacagaggattccaagtgtgatagttgttccagtagctatggcaagatagttttgaggtatttacaatgagttaaatttgggacatgttgaatgtgaggtgaccttggttttagattcctaagtttggcttgtttgtttatttatttattttatgtttttatttttttgagacagagtcttgctctatcagcccaggctggagtgcagtggcatgatatcagctcactgcaaccgctgcctcctaggttcaagtgattcttgtgcctcagcctcctgagtagctgggactacaggcgtctgccaccatgcccagctaatttttgtatttttagtagctaggggtttcaccatattggccaggctggtcttgaactgctgacctcaagtgagccagccgcctcggcctcccaagtgctgggattacaggcgtgcaccactgcgcccagcccctaagtttggtttagattggagatactcctaatgttccacattaggtaccagtgcacatttgggatttattattacaaagacagtacttgaagtcattagatctctaaaggcattagtaatagttaatgttcataaatatgactgtcagtcatcaagaagagatttatgtttagcaggctatttatgaagacagggattaagttttttttattccatttaaagtatcaaagatacagttgttttggtgcctaaaaaataagcttttgaatatctagattggtgagatgctagattggtgagatccattcattcaggtatttagtgagtacttactaaggtattctacaaataaataaaggagaagtcatgatgaaagatagggtggtatagtgtgtgctgctattagtaaaaacaagcttttaaagtaggaatgatctaaagtgtaatttgttttcactcagtaacttatttactcaatctttaatttttattgaggactcactgtgcataaccttatagtacatggaagaataaatgtgcatattgtaccaggtgctaagagtgttaaaatgaatagaagtagtccctactttcaaggatcttgtatctatagagtcatataaatatgtacatatagtatgtaataagtggtaaattagaagaaaaggctgatttcaggatgtgaaattcatttaattggcctccacttaagccagctcattggattcattgatgctgtccattccttctataaaatataggatggatgctcatagggaatagtataccaggctttgttgattccacaagttgacttgtaaccttaacaataataacagctgggaaagttatttaacctgaaaaaaatgctgctactactactactactaccactaccactactactactactactactactactactactactactactactactagcaaacttttatctagtgattattgtatgtcaggctgtcttctaaatgttttatatatattaactcacttaaccttcctggtaaccttaagaaaaatgtaatattactatccatactttagaggtaaggacactgaagcatagagaaacttaattacttgtcccagtttagtcagctagcaatggtaggaccaggatttgaacccaagcagcctagctctagagaccaaactcttacaactacggctgtcactcaagagccagctgtgtttattttcaaccttgtatatgtcaagttgtacatattagtgtcattcttaacttaattaaatattatataaattgatgaaatgtgagtataaaaaacgtgaatgtttttataaaaataagtgctttggaagcaattttgctaaaaatcactaattaggcatggtcaaaacaactgtaaaagattcaggaggaaatggtttaagaaaaactgcactcgaattgctttgtaggtgtctttatgtttttactcccatttatgtatttatgtatttatttatttatttattttgagtctgaatcttgctctgtcatccaggctggagtgcagtggcgcgatctcagctcactgcaacctctgcctcccaggttcaaacgatactcctgcttcagcttcctgaatagctgggattacaggtgcgcactgccacgcccaactaatttttgtatttttagtagatacagggtttcaccatgttggccaggctggtctcaaacttttgacctcaggtgatccacccagctcggccccccaaagtgctgggattagaggtgtgagccaccgtgtcagcctattcccatttaaagaactgaaaaatacagccagggccttacaggggtggcatacgcaagaaagacctgtaattcccattagcaagcccatactccagggtcttactcaacaccaaaatatcagttatttgtatacgtttatgtttaaaataaaacaaaatgtttaaagtatacatattattttaaaaatgattctctgggttaactgaccttgctgagtgatttgtcctctctctgtccaatgctgtcagttaagatggcttttcttatagttagaagcaacatttaatccagattgtgatggttaggaaagaatttctggtggagatagatatctgagataagacttactgaatgggtaagacatgaaagtgaaggaggaaaaggatatttcaggtagagataacagcaactaacaatgcacagaggtagaagaatgtgcatagtaaactgtaagtagtttattacagccatagcatagaatgtgaatggctgttggaaatagctgagactggataggaagttagaggttagattgtgaaaaaatttgtattgctttctttatgattttgctctgctttctcaaagtctgttctcaacataggagttagaatgatgcccttaaaacgtagttcagggctgggtgcggtgaaccctgtaatcctagcattttgggaggccgaggcaggtggatcacgtgaggtcaggagttcaagaccagcctggccaacatggtgaaaccctgtctctactaaaaatacaaaaattagccaggtgtggtggcgtgcacctgtagtcccagctactcgggaggctaagacaggagaatcacttgaactcgggaggcgcaggttgcaatgagccaagaccatgccattgcatttcagcctgggcagcaagagtgaaactccatctcaaaaaaaaaaaaaaaaaaaaaaacaagagactttgtcaaaaccagagaagcaaagaaggagattttgaaaatattattaatgtgtttgtttccattaaagccagaaaaataaaactataattagtccaatttctggtataaataaatttaaacttaaagtaatatgtgagttttaatgcacctacttttcaattttttagcattttttaactactttgatgttctggaaaaatgttaactacagccaggtgtggtggtttatgcctgtaatcccagtgctttgggaggctgaggtgggaggattgcttgaggccaagagtttgagactagcctgagcaacatagtgagaccctgtctctacaaaaaaattaaaaaatttgtcaggcatggttgcatgcacctgtaatcctagttacttgggaggctgagataggaggaccacttgagcccaggagttggaggccaatagagcaagaccctgaaaaaagaaaagaagaatgttaaccattaaaaaaaaatatacatcaaaacacatatgtgcagttttgatgcacattaatggtatcagtgtggctcattaagatactcttgggttctatatttaaatgtttgatattttgctcattatggattgtttacattaattttgattttaaaatattgcattaaaatattatttttcttgattattgaatttttgagcactcttttaaattttgcaccctgggcgaatgctttacttcattctaatttccagtagtatcttccactataaaatgagttccttggttggaggtgatgttgagtgagattctgtagaattctggaattctgtagtgtagtgttcagaaagtctgttaattatagtgctggcagagagttgtgggcagggaaagcaaatccttagctggaatacataactattcttgtgaggggatctcaaccttggctgcacattggaagcacctcaatctctgtgggtgggacctaagcatcattgattgttaaagctctccaggtgattcagtgtgcagccaagattgagaaccagtgatctacagcagtccttcttaaactttaatatacgcatgaatcctatggaagtctcattaaaatacagatgtcttagtttcagggagtaagtatgcattcataaaaagcttcccatcactgctggtccattgactacactttgagtagcaaagctttgttgtgtgctacaaaaatttcactgttttcacctcaccaactataggccacagttgagtccagatttcaatgaacaaacccagcagactgttaacaccatttctttttttttcctttttggacggagtctcgccctgtcacccaggctggagtgcagtggtgcaatctcggctcactgcaacctccgcctcccaggttcaggtgattttcctgcctcagcctcctgaatagctgagattacaggcaccctccatcactccccactaatttttatatttttagtagagacggggtttcaccatgttggccaggctggtctcttaactcctaacctcaggagatccacctgccttggcctgtcaaagtgctggaattacaggtgtgagccaccaccctggccctgttaacaccatttctaaatgtctgagctaacactttaaatcatgaatcttgggtgaacatacccatatcagtaaattcagccctacctaactacatatttttttcttttgatctaataaccctagaatcaattttcttacatgctctctggaatcctactgatacaaataagaaagtttctacaactccagtgtatatgcttgtacttatatctccctaccttgtacttatatctctaggcgaagctagcctctaacccctcttattggcctttttgaggtagtgaaaagtggtaaaggtgggtgctgaggagaatgggcatttctttctgaggcaaccgtttcagatgaagttactgaaaggtttttatgcaagagaaagctggttggaacatgggtgaggaggactgttctttttagcagaaagttttgggattttggggttccaaagttaggcttcatttgtttgttcatacatccttatcccaaggcacaagagtcccacttcttctcaacccttgcccttaccttcggtctggcagggttgtacttttaaatggcattgcacatctgcagaccactcaggcattgggccagatcttcagccatgtctgtcttgggctttaaggttgcaaaaatgaagaagatatgataccttgaagttatatgctatttttgtaaacattatagttttctctctgcttaactttagacttaacatgagaatgagtatggaaagttgaagtatttctttgaatgtattacattccattgccaatcagtgaatatttagagggggccttaaatgtccaagatgctgtatcatattgacattagattataatttgttggccattaacattttgtgttttttatttacagaaacttattggagaagtgtttaatattgtgagccaacagtctactgctcgacctggctgcattattgaactcgacgcaataaccaaccaagtaaaaacatgcttgtgaattggtgatattcgtatactttatcccatggtgttttatatgtatatgatatatgtcattctcagaataattttcttgtttgttattaaatgcagacaacttatgttgattcccatagtgaaaatctactaatgatttagggattatttttctccttgggaaaccaagaactgtatgttctcatttataagtgggcgctaagctatgagtatgcaaaggcatgcagagcaatataatggactttagagactcagaagagggagggtggaaatggaactagagatttgaaaaaccacatgttaggtacagtgtacactacttgggtgatgggtgcactaaaatctcagaattcactactagttcatccatgtaacaaaaaaaccacttgtaccccaaaagctatttaagtaaaattttttaaaaaaggaattattcttctccagttgaattgtatttgtagcaaaggaaatttgattcatttagagaaaccatgaccttgatcttgaaatgctgagagaaaatacagtgcagctgcatagaagggtcgggttgtggtttctcattttatattattactcttttcaactcaatagagggtaacctcagtttcagagtgtttgccttgttaggccccatgttgggtacttttgtgaggtcctttaaaatgcagatgaaagtcagattcaagtggacatatactttttaatcacaggtcctttgtgtagtattcctccccagctactacctaggaaagaaggagaacccttctccctagagggagatgtaaaacccattttagccctcaggatatttgtttctttaggactatgtttatggtctaagggatagaactaacatttattccaaatgtgaaaaggattagtttggtaaagaagctaccaatagttttaaacaaggaaatgaagaaagagccaactatagttgaaagcaagtatagagttacatcataaattttctttagtgtcttgcactttctattggggaaaatgtactcatttctgctaatatagataaaatacatcatctcttgatagcagaactggggctgccagacccatattgctaatacctcctgggaaatgcttaactttttaatccccagtgccccacctttcttcagattcagcctgtgatttcttttttctactcaataggaatgtagaagagtgggttggcttccttcctatagataacttaatttttaatggattggatgttaaattcatcccctactttagcctcctttgcactcattaccatgggatattaacacagtctgctctcacaaagcagtttttttacttcatatttgctcaacactttttcccctgctccttgtgcctatttttaacacaggggctggtaaactgtaagcaataatgaatgacaaagtttaaaattctttctaggtttgttcccaatgtgttgtatgatttctatatctgtgaagacatcacccttctctttactttcatctattgtttgtcccttggggaaatgacctcctagacaatgaatgtgaagagatttttaatgtttctacctagagaaacacaaaataccctataactttcataaaattgtatggcccaacctaatattataatccttttatttctttctattatgtaaagaggcaggttttcctttattctataagattatagactcctcatccaatgccaagataatcatagctgcttccttttcttgaaatctctgggggagccatctgattgattgtcttaatacacttccaaaataagcttttgtttggatctagcctttccttgaacttcagttcctgttaaggttctaagtagccattcgtgatagtcttaaaacatggtcatggagcatagcagttgacagtgatgtttcatccatccttcgaggggttctagttacttatgtgtaagtttagttctctagagatgtatcatcctgctggctgttataggatccctcataattcccactagacagagctattgggatacttcgaggagctttctgggttttgttttgttttttggttctccagtggaattgaaaaaattacaagttgtgtagtagtctagtgtgtcttacatagtgcagccctccctagtcagttgtgaatctgatgctttcaggctcaaagtggtgaaggttgcttaactgttctttaaatttggaatttgggttttttagcatctttttttttttttttttcctgagaagcaaacctgttgatttgtttgtactagagctcttctattctgctattggctgtgacatttttgaaagtaatttttctctgaccaggatagttttaatgattctcttctgttgcttttttctttctaattagtagtggtaaagaatagaaattgttagatatatttcttctgcattagcattggggaggtgacagatgggagatgggagacagggaatttcaaagataaaacctcttcatttttttttgtatttgtagtgtggctcaaatacacagttgcttcatgtgtttcaagaagacttcattataggatataaaccacataaggaagatatggagaaaaaggaaacagaaatattttttcagccatcacaaggtactttaaaaaaatagtctgcatttgtttaccttcatgctaaaaaatgatctctaagttttcactgagtatggatcttcaaaagttaccactctcataatttttgacagattcaccagttagttctgtcaaaattgcttgcttgtagatgaagagggctgtgggtgaaaattactttttgcaagacaattcattggtgacatcaacttttactaagaaatggtatctgtgaaccttaatttgttttaaaaagtaagtttcttcaactctataattaaattattttgattggtagttccatttggtatcttaaggaaaacagttaattttattacaggttttaaaaaattaccagtaaattgcttcagaccaatgatgaatataagatataaggtatcatgttgtgtgggacactagaaacctcatggaaatagtgaatgcaaggtaccatctcacagttttcccctttgaagtgtggtattttttcctttttgtgaaagtaagtagtttaaccctttcaaaaacaaacaatatgacgtttagtttaaactttataacttagcttaaaatgttcccttcagacgttaaacttttatttaagttttttaaattggcaaataaaattgtgtgtatatatataacttcataattataaaaccaacatgttctatttgaaaagccatgtctttaagaattaagtgtctatggcgaatatttagtttacaaagggttttcagataattaatctcatgtggttacaaattgtgaatatccagatggacatatttaattttcttagtgtagtcttcatcacgaaattatgtatagcatctaaggaaactgtttctatgtaatttgtgcagacaatttccttcgctttagtgaaaatcagattgaggtcctgtattctaagaagcttagctcaaacatcttttcactcgtcagactagtaacttgtttttctttcgtatatctttcttcatacacaaaacttttcttatttgtgttattcaattatgttaagttttatttcactatcattataacagcagtactgctttaccaatttaaaatttacttttctgtagtatcttacctttgcctgggttaatctttttaatatggtttccaacaaatgtagctgccatttatcacattatttctaacaggaaagatatgccagcttaccagaattcaatgcttatataaagttggtacttttctttataatattttaattgacttgcattaaaaattttctttatttctcgcttttgatatttgttatgccactgctaaatcaggccaaaagatttcctcagtgctttcttggttttcctttagtttttgtgtgaaatttctctttcttcctgattttatagctgtgttcttaaaggacttgtgtaggtttctcctcttctctgcctctgctttattttgtactaagttttaatttaaagttaattacccttttagttaagaaaaatgccaaaaatagacaaaattatagtgcataattaaatgaacctccatattcccataatgtaggttaaagattttatcacacttgctttgtctacacaatttttcttttccttttccccccgaattttttttttttttttccgagacagagtttgctttgctgcccaggctggagtgcagtggcgtcatctcagcttactgtaacctccacctcccaggttcaagcaattctcctgcctcagcctcccgagtagctgggattacagctactcggctgtaagcccacctggctaatttttttgtattattactagagtcagagttttaccccattggccaggttggtcttgaactcctgacctcaagtgatcagctcaccttgactcccaaagtgctgggattacaggcgtgagccactacgcctggcccccctgaaatattttaaagcaaatccacctacagtgttgtttcacttccatatgcgtttctaaaaataacttccttacatatttgctgttatcaaattgataataaaattcctcagaatcgtgcaataactactccatatttcttccagttgtctaaaaaatgttgagctttttgtttgtttatgtgtttttgtttgaatctatatccaaacaaagtttacatattgtgttttcattgtctatttaaagagtattttaatctaaagtgataccttatatacaccctcattatgccactgacttgttttagagcaagtttatttttattattattttttattatactttaatttctggaatacatgtgcagaacatgcaggtttgttacatacgtatacatgtgccatggtggtttgctgcacctatcaacccatcatctacattaggtatttctcctaatgctatccctctcttagccccccaccccccaacaggccctggtgtgtgatgttcccttccctgtgtctgtgtgttctcattgttcaactcccacttatgagtgagaacatgcagtgtttggtttttctgttcctgtgttagtttgctgaaaatgatggtttccagcttcatccatgtccctgcaaaggacatgaactcatccttttttatggctgcatagtattccatggtgtatatgtgctacattttctttatccagtctatcattgatgggcatttgggttggttccaagtctttgctattgtgaacagtgccgcgataaacatacatgtgcatgtgtctttatggtagaatgatttataatcctttgggtatatacccagtaatgggattgctgggtcaaatggtatttctggttctagatccttcaggaattgccacactgtcttccacaatggttgaactaatttatactcccaccaacagtgtaaaagccttcctgtttctccacatcctctccagcatctgttgtttcttgactttttaatgattgccatcctaactggcatgagatggtatctcattgtggttttgatttgcgtttctctaatgaccagtgatgatgagcattttttcatatgtttgttggccacataaatgtgttcttttgagaagtgtctgttcatatcctttgcccactttttgatggggttatttttttcttgtaaatttgtttaagttccttatagattctggatattagccctttgtcagatggatagattgcaaaaattttctcccattctgtaggttgcctgtttattctggtgatagtttcttttgctgtgcagaagctctttagtttaattagaacccacttgtcaattttggctttcgttgccattgtttttggtgttttagtcatgaaggctttgcccatgcctgcgtcctgaatggtattgcctaggttttcttctagggtttttatgattttaggtcttacgtttcagtcttcagtccctcttgagttaatttttgtatgaagtgtaagaaaggggtccagtttcagttttctgcatgtggcaagccaattttcctagcaccatttgttaaatagggaatcctttccccattgcttgtttttgtcaggtttgtcaaagatcagatggttgtaggtgtgtggtgttatttctgaggactctgttctgttccattgttctatgtatctgttttggtaccagtaccatgctgtttttgttactgtagccttgtagtatagtttgaagtcaggtagcgtgatgcctcaagctttattctttttgcttaggtttgtcttggctacgagggctcttttttggttccatatgaaatttaaagtgtttttttctaattctgtgaggaaagtcaatggtagcttgatggggatagcattgaatctataaattactttgggcagtatggcgattttcacaatattgattttttcctgtccatgagcatggaatgtttttccatttgtttatgtcctctcatttccttgagcagtggtttgcagttctccttgaagagggtcttgtaagttgtattcctaggtattttattctcattgtagcaattgtgaatgggagttcactcatgatttggctctctgtctgttattggtgtataggaatgcttgtgattgttgcacattgattttgtatcctgagactttgctgaagttgcttattagcttaaggagattttgggctgagacgattgggttttctaaatatacagtcatgtcatctgcaaagagagacaatttgacttcctctcttcctatttgaataccctttattgctttctcttgcctgattgccctggccagaactttcagtaccatgttgaataggagtggtgagagagggcatccttgtcttgtgctgcttttcaaagggaatacttccagcttttgcccattcagcatgatattggctgtgggtttgtcataaatagctcttattatcttgagataagtttcattaatacgtagtttattgagagtttttagcatgaggggctgttgaattttatcaaaggccttttctgtatctattgagataatcatgtggtttttgtcattggttctgtttacgtgatggagtacatttattgatttgtgtacgttgaaccagcctctcatcccagggatgaagccgacttgatcgtggtggataagctttttgatgtgctgctggattcggtttgccagtattttattgaggtttttcgcattgatgttcatcagggatattggcctgaaattttctttttttgttgtgtctctgccacgttttggtatcaggatgatgctggcctcataaaatgagttagggaggagtccctctttttctattgattggaatagtttcagaaggaatggtaccagctcctctttgtacctctggtagaatttggctgtgaatctgtctggtcctgggcttttttggttgataggatattaattactgcctcaatttcagaacttgttattggtctattcagggatttgactttttcctggtttagtctttggagggtgtatgtgtccaggaatttatccatttcttctagattttctagtttatttgtgtagaggtgtttatagtattctctgatggtagtgtttatttctgtgggatcagtgatgatagcccctttatcattttttattgtgtctgtttgattcttttctttttttctttattagtttggcaagtagtctatctattttgttaatcttttcaaaaaaccagctcctggattcactgatttttggaagggttttttgtatctctgtctccttcagttctagagcaagtttttttttttaaagaagtttctctgactacttacttgtgatgttgtttaaactttttcttgtctactgtattgcctgtacagtggaagttagctctacagacttgattagatctgggttcaacattctgggtgatgccatgtacttcatatgtatcataccagaaaaaaaaatttggatatctcacttttagtcatattaagattcggaagattcagttggtggtggtgtcattatagtttgacagcagtctttatctcatggcttcttccattgaatattattgatcttaaaccagttatttcattagggattgaaaaattatgattttccaattttatcagttctcatttatttattagctggaaagcatctgtaaagaaaagcatttctttatcaactagggctattggattactttgaaaaacagttctttttggaaaggttaagtgcttagttatttccatttaattgacagtttcagaatgaggagtctgcgcgctggttatctctagctgctactgttgaatttattgttgttgttggatttctttgtcttttaagtatcaatatgaactcattttaagaaaactctttaatgaactataatatacatacagagaagtactcatataactcaatggatttttaggtatgtaggatatttcagtcagttgcagtcattttttaaatgcttacatagtgctatattaggctagtaagtagcatttgaagtaggtcctgtgtccttttgacataacctcattattgtaatagtttactttctttcaggagcaagattttcctgggtttatcttgtagctgtcctttgcaagaatggaatcatccttccaaactgtttcttttttaaaaattattattatactttaagttctgcgatagatgtgcagaacatgcaggtttgttacataggtttacacgtgccatggtggtttgctgcacccatcaacctgtcatctatgttaggtctttctcctaattctttccccttcctagccccctacccccaaacaggccctgatgtgttatgttcccctccctgtgtctatgtgttctcattgttcaactcccacttatgagtgagaacatgcggtgccagactgtttcttctaatgaaaatggttagaggccacaattttaactctagcagcgctcattaccaatatgttgtcattatgagttttaatgattaaggaaagcttttattatcctgcattagatctcattttcagttatgaagaatctaattttcagcagggaaaattatatatacaagtaatgtctttttttaaaaaatgcatgaaatttctacaaaattttttctttaccctaccactgctccttcccccacaacttaagttttttttttttttaatgctgttttcatgcaagaaaagcaggatgaatgtttattttattatttctttttaattgccagttttctaaataaggcgtaagtgccccagttactccaggggcatcctgtgaggctggcttgagcttttgtgtgctcagcaccccgcttccttcccttctatcctcctcccattcttctgctgctgctttctttcctttgctttcttttttatgtacccttttttggtatttgtgtgaactcatagtttgtaataggataaatacgttttaacaaattgtattcagttttattctttgatgctcaaaatgtcccctctttgactagtaggtatcctttcatgttagcttttgtgtacttttgacgtaatttcattagtccttgatagctatctaactttcggtacaaaaattatataaaactcctccttaaagtctttcttgccttttcttcccaacttccatgcatatcaagaggtggtggtagcttttaaaaagtgtttttttaaccccataaaaacatactaatttaaatatccttttcctttgaataataggataccgcccaccaccattttcagaaaagttctttctagtagtaattgagaaggacagcaataataactctattctgcatatgtggcaccttcatcttaaatctgtacaagcatgtttaggtaagtaattatagttttatacagagatgatacataacaaatttattttatagaatatgctttactttggttaattctgtaaaatgaagttccattaaactgtaaattgagttgctgaattatgtctcttctaaacttttaattacaaggtcataaatcattaatgaaactggttaattctaaaaaccagcctaagggcacattagacatattgaaaaaaaataaaagctttgtttatttttttcagtgaatatttattgagtgtacattatgactgttctagatgtccatagaactaatattgtacttttttgttaatacacattcccatccaatacactgcacatcatcagctttatcatcattaaaataagcagaattggctgggcgcggtggctcacgcctgtaatcccagcactctgggaggccgaggtgggcggatcacgaggtcaggagatcgagaccatcctggctaacatggtgaaaccctgtctctactaaaaatacaaaaaattagccgggcgtggtggcgggcgcctgtagtcccagctactcaggaggctgaggcaggagaatggcgtgaacccgggaggcagaggttgcagtgagctgagattgcaccactgcactccagcctgggcgacagagcaagactccatctcaaaaaaaaaaaaaaaaaaaaagcagaattgctgtttgatgaaatatgattgagtgcctgagacttataagcagaactgtttttgtagagcattaagaaatacaggctgggcatgggcatggtggctcatgcgtataatcccagcactttgggaggctagggcaggacgattgcttgagcacaggaattcgagatcagcctgggcaatagagtgagacttcatctctacaaaaaaataaaaaattaattaagtgtggtggcatgtacctatacttgggaggctgagatgggaggattgcttgagccctggagtcagaggctgcaatgagccgagactgcaccaccgcactccagcctaagtgacaaagtgagacccttgtcaatttttccatttcaaaaaaagaaatgcaattatgattaaaaaattacttcagccattcttttgctgtacacatttagattaatctctaaactaattgggaaatctgtagtatgaagcaaagaaattgatcacagattttttaaaaacaaacttttcctttttgagagataattgttaaaatgaagaactgcatggatagccatatcacattgaatctgctttaaactgttaactcaaaatatttgagttgtaagattttattatgtcttgtaattaattgattttatacaactttttatataacatttaatacagtgaaagaataatttgtacttttttgttcacatgtattatacattatcacaattgtagcagttctaactgggccatgaattggcattagaaaagccaaattatgtgacagaacctttaccttcacctagttgagcctaatcttcttgaggcaccaggaatttaaaaattctttcaaagcctttggagttaattctttgcattatatgttgtttgatagaaatgcaagagaagggatctgaaaccagttcatcaggaagagattcacccagcagagaatgtagtaatttctagagttgggcacagaaatgggagtggctctgaagagatttataggggtagtaacaggtccttgtgggaggacaggaaccatgtgattttgtttgtccccactgcttatgaagcgtgtgtctcactaaagccagggctagagttgagttgcttgcctaccctgtttgtgacagcagtaggtcacagacaatgagattacagtagaggcaaataatgtactctttttagctgtgatagaaagcatctatctttttgttctaatctttgctgcagatttaacagtgtatcctgccattcacatttaacgcttgaatttactgcagtagtgaatatcctgttagaggataaatgattggtttaaattttgttagagaaggaaacatgttgagtaccttctgggtgccaggcactgagattggtgctttatatatgtgaatagatattatccccagtttactaatggagtaagggtatgtaacttgaccaagtcccattatatggtttgtcacagaactaagtttcaaaatcaggccttgttgactctaaagtctttgctttttttcctgctcttattttctttcttagcatgagatatatgttagaaaatagtatgatttacaggaagagaaatgatgtagtttaaccttagtttgctggtgagaaagtagccagagatggtggtgaagtgcctggccaaaggaaacacatctcattagtgataaagccaggagtgggactctgtcttctgactacggatccaagtttgtagtcttatttcattttacaaaaaaatgtgaaaatatttcttacttagtggcctgccattataagatagattgacatgtttaacagaaacaaaagaggattattatttattgaatattctggtgctctttgagatgtacaaggcaataacaacacatcatccctgcctttagtgaatttgtagtccaatggggagagacagataaataaataaatatagagtatctcttatatgtcacggaagaacagataactgaatcagagatttacactcactggaagttctttggaagatcaagtcaatatggcttacaaaggctgtcaactaatactatcttaaattttcttagaacttttggtttttgtgtttattcttgaaatcattctctgatttgagtacttgataggaggctactagtctaatgtcttctttgcccctagctaattacatggcctcaggaaaatcactaagctctctgagtttaaatttcttaatctaaaagtgaggcagtatattgttatttcctaaagtttggttcatgatccatctatttcaaaaacacctgggctgctttactgggatctaccccatatcatctaaatcagtgtctctgtggttaggcctgggaatttgcatgttaacaaattcctcaagcttttaatgtgttttaaaggttgtaagcactggactgtataaggggtttcttttagcttttacatgttgtgattcttccctgtcagtcttgcatgatggagttggtgctaagaaagagtaaaattgtaaaaaaaaaaatttaagcttatcagggtaactaagcaaaagtttgaaaattgaccttgtctgcaaagtaatttttttaaaaaaatttattgatgcataataattatacgtatttatggcgtacatgtgatatttttatacatgcatagaatatgtaatgatcatatcatggtatttaggatattcattaccttgaaatttattgtttcttcggattgggaacatttcagatcttctcttctagctcttttgaaatatacattgttgttaactgtagtcattctactgtgctatcaaacaatagaacttatttcttctaccttcatgtttgtacctattaaagagtctcttcacccaccccacaacccttcccattctctggtatctattatgctattatctacctctatgagatccactttcttagctctcacatatgagtgagagaacaggtgatatttgtatttctgtgcctggcttatttcacttaacatactgacctgcaatttccaactgtgttgctgcaaatgacaggatttcattcttgtttatagctgaatagtattccattgtgtatatatatgacattttctttatccatttattcattgatggatacttaggttgattttatgtcttggctgttgtgaatagtgctacaataaatgtgggagtgcagttatccctttgatatactgatttcctttcctttgggtaaacacctagtagtgagattgctgagtcatatggtcattctgttttaaaaagagctctcttttctctatatcctcacctccaaaatacttttaagaagctatgtttcttaaataataacaaagtaatattctagctcctatttatagtaatgatatacatacattttgtaattttataatttatttttaaagctaaagcttcagaaggggcttcctctgagagtctactttcagtccctggacagaagaacgtagattcttctccagaaacctctcctagtgtgagccccatgccacattcttcatcaattgccaatcttcaaactgccagtaaacttattctgagttctagactggtgtatagccaaccccttgatctcccagaatcagttgaagtaataagagcaacgccttcagcaggtaaggtcactttaagactgggcagtggtagctcagagtgataaaatatatgaactctttagtggataaaatagatgaactcttctgaaatatgttctatgttgacattaaaataaagattgattttctattaatgatatgtctagatggttagaaacatgtctttattagaaataatttcctggctgggtgcggtggctcacttctgtaatcccagcactttgggaggctgaggtgggtggatcacttgaggtcagtagttcgagaccaccctggctaacatggcgaaaccatgtctgtactaaaaatacacaaattagttgggcgtggtggcacgtgcctgtaatcccagctacttgggaagctgaggcaggggaattgcttgaactcgagaggtggaggcggcagtgagctgacatcacactactgcattccagcctgggcgggcgacacagtgagactccatacacacacacacacacacacacacacacacacaaacccacaaaatttcctgtgataaatgtaatcagcttgacagaaaatagtgtaaattttttttttttttttttttagacggagtctcactctgtcgcccaggctggaatgcagtggtgctatcttggctcacttcaagctccacctcccgggttcacacccattctcctgcctcagcctcctgaatagttgggactacaggcatccaccaccatgcccagctaattttttttgtatttttagtagagacggggtttcaccgtgttagccaggatggtctcgatctcctgacctcgtgatccacccacctcagcctcccaaagtgctgggattacaggtgtgagccaccacgcccggccaaaataatgaaatttttttttttttttttgagatggagtttcgctctgtcacccaggctggagtgcagtggtgctatcttggctcactgcaagcttcgcctcccaggttcatgccattctcctgccttagcctcccgagtagctgggactacaggcgcccaccaccatgcctggctaattttttgtatttttagtagagacggggtttcactgtgttagtcaggatggtctcgatctcctgaccttgtgatccgcccactcggcctcccaaagtgctgggattacaggcgtgagccaccgcgcccagccaatagtgaaaatattttaatgtgaggtgtcttgcctacactttggaatataatgatagtaaaattttgaagaacaaatacattcatttgtaaaccactgaggctttttttaaaatttaagacttcattcacattgtggtaatcacgtctcacctttattaagaatgtttgaacaacagttggcagatactctgaggaaaaatgtaggataaaagactatagtttgggtggtctggaatgatactgactttagcaaggtagatattttgagggcaagtctggcagctgtgtttaaagtgatctacttgcagaattttaattggggagtttctagaatagtgtttttgggaaaccaaaattggaggttcggggccgctaaaattactggtgaatgatattcagtataggtgttttcttattcatccgtaagacaggtttgcattcacagttggaaagatcatattgagaagagtgtactcttgggcttttgtggctggtgcagatctaggccagtttgttaatctttcaaaatatttgaaaggtttgggttatactcaaataagtttattggagttcgtgataataaattatattttacagacgccttataaaatgtcttatttgacaatagtaatctaggggaaacagtaactgatcccaattgtttagatggaataggctcagatgattaagtagctttcccactgttaatgaaattattgatgggttgaaactcaaatccagatcttctgacctcagatctttaatctctatatccccttgtcttacagttgacaacagatgtgcattgttagtctttggcagtcaggaatagataagagggttctggttcagtgctaagagaggatgaattaaacttggtaaaatgggtaagatctattggtctgttttgcggtctgaaacaaaatttggtgtaccacctggggtctggattatttgagagaaggttaggggcatttgaaaggcaaattgtaaagctcagttaagtattcatgatgaaaatgattaaatatatagtatgaaattctaaggaggcatgttgtgaaggtaaatataaataatagaaacacattaagggctgacttgtttcagtgcttttgagttttattttaattaaatggttgcctcatttaaacttaattacctaaaaacaaattaagtgattattattgcataccttgatttcactgatgggctcttcaagacctttatagatatgttggccaatggacatttagtgggatactagttaagaggaagactgcagagatattctgaagaagctcatagtgactttaaattgatcacattccagaatttgattactaccatattattttgtggctttattattattacaactaactatttgctttttcttttttaaggccatctgagttcttcttcaatttatccagtgtgccttgcaccttatttagtggttacaacttgttctgacaataaagtacgcttctggaaatgttgtatggaagccaacccagagtgtaataaaagtgatgagaaagaaatttatcattggaagagatggcctttgatgaatgatgaaggagaagataatagcagtacagtgagcattgtgggaagaccagttgctgttagctgttcatacacaggtcgccttgcagtggcttataagcagcctatccaccataatggttttgtttctaaagaattttccatgcatgtttgtatatttgaatgtgaatctacaggaggatcagagtgggttttagaacaaacaattcatcttgatgatttggttaaggttgggagtgtacttgattcaagggtcagcgtcgacagtaatctgtttgtgtatagcaagtcagatgcactcttgagcaaggatagatatcttattccgaatatcaaacatttagtacatttggactgggtatcaaaagaagatggctcccacattcttacagtgggagtcggtgcgaatatcttcatgtatggaaggctttcaggaattgtgactgagcaaaccaacagtaaggatggagtagctgtcatcactttaccactaggtggtagtatcaagcaaggagttaagtcaagatgggttcttcttagatctatagacttggtatcttctgttgatggtactccttcactgcctgtttctctctcttgggtaagagatgggatattggtggtaggaatggattgtgaaatgcatgtatatgcacagtggaagcatgctgtcaaatttggagacactgaagctgatagttctaatgcagaagaggcagcaatgcaagatcattcgacctttaaatctaatatgctggcaagaaaaagtgttgttgaaggaacagctatttctgatgatgttttttgttcaccaactgtaattcaagatggtggcttatttgaggctgcacatgtactttcccctactcttccacaatatcatccaactcagctgttagaattgatggatttagggaaagtgcgaagggctaaagccattctctctcatttagtaaaatgtattgcaggtgaagtagcaatagttagagatcctgatgctggagaaggaactaagcgacatctctctcgaactattagtgtaagtggcagtacagcaaaggaaacagtcaccgtaggaaaagatggtactcgagattatactgagatagattctatccctccactaccactatatgcattacttgctgcagatcaagatacatcctacagaatttcagaagaaagtacaaagataccacagagctatgaagatcagacagtaagtcaaccagaggatcagtattcagagctgtttcaaatccaggatataccaacggatgatattgatttagagcctgaaaagagagaaaacaaatcaaaagtaataaatctttctcaatatggaccagcttactttggccaagaacatgcaagggtactttcaagtcatcttatgcactcaagtctaccaggccttacccgtttggagcagatgttccttgtagctttggctgatacagtggctactactagtactgagcttgatgaaagcagagataagagttgctcaggtaaatattctcgctaaaaatttataaagttgtacctaatagaaatatttgtattatctctatactgactcatttactgaattgcagtctcaactttcaaactttgcagggaaaagacctccttaataggtaattactattatataatatgctcagttagaaaagacggttgaggccggcatatgaatgcatggatttgtgagatccatgtgcattctctcatgagtttttacactgaaacctttgtgtcattttggatttataatcttgtttttttgtgtgtgtttgggtgggttttttgtttgtttttttgagacagggtcttgctctgttgcccaagctggagttgagcggtgcagtcatgggtcactgtagccttaacctctcaggttcaagtaatcttcctatctcagcctcctgaatagccgggaccacaggtgtgcaccaccatggggcccagctaatttctttttattttttttgtagggactaggtctccttatgttgccccagctagtctcgaattcctgagctcaagcagtcctcctgccttggcctcccacagtgctgggattataggtatgagtcaccatggactggccaagtctcttgttttttaacacagattgatccctatgattttttctttgataataacagcccatttgttaatgttactatggaatcatgaggcttattgggacctcatgggctcaacttgttggtcttcccatttctagccataaacaactttttacaattacctaattttctccaaaaagtctcttcagcgagatttccatacagttaatgtcatacgtattttgcctaattcattctgtaactagaaaatttttggctgcttcctggaactagattccattctcttttatgcacatagttcagggtaatggtgttgattgtaaatgatggcattggcaaaggaaactgaaaattaatgatcagaatttcattaattcaataaatattttggaggagtgaaaaattgctatgtttcaggcactttctttactttatcatatttaattatcacagtcttctagcagatagctattattatgtttaactttatagatgaagacactgatccttaagaaattaagggactcatctgagatcacataggcattaaggagtagaagtggagttcatatgtggataaactgttgactcaaagcctgtacccttttaactatttcatgatttccagatctgtgggggaaaggtagctggaaaatatctcttcatatagatttacatccttatagtatatcccccaaagttttcttctctgcaggttaaaataactagagaccttctagggttttgcctatgacttattttctcactattaattggaaaagaaaaatcttaaccattatgaggttgtatgcagttgaatgagattcttcccagaacaaccttaagcttgtgttgtgtgtttaatatatattagtttttactgtgggacattaagaaagtaggcatggcatgatttgtaaaaaatagtttatactttctaatacaaaactgtatcattggctaagcaatatagaaatagtgtatcctggacacagtggacattcatgaggtaataaggcaggaatgaatgtctccatttcacaggtgggaaactgaagctcagagattaaatgagttacacatctcagtaaatggattctaagtaaatgagttcttccatttgttcaggtgagacaacttacagtcattcttgactctgctttctctcatacccagtatccagttcattggcaaatgctatcagttctattaatatccagaatccaataatcaattctcattacctctgcagttactactctggtccaagtccctgtcatctcctaactgctttattctttttacctccatctgttctttgcttaggaaccagtgattcttttaaaaccaaatcacattaaatctctcctttgctcaacatatactggtgccttcctgtctcactttagaataaaagttaagagccttacagtggcctaaaaggccccacacgatctatgctcatttctactctattagaatgctcttcttccagattcatgcatggcttgttcctttacttcctcaaattgctgctggcatgtcatcttattggagagttccttcctggccacactgtatgaaatagaactctcttactccagcattccctatctctcagtcctgctttatttcccttcatagcattaatttccacatattatttgtttattgtttgtctctacctcctaaaatatgatccccaagagagtagggactttgccttattcactgctgaattcccagtacctgaagagtccctcacatgtaatagatgcttgatttgttgaatgaataaacggacgaatgagcatggtggctcacacctgtaatggcagcactttgggaggttaaggtaggaggattgcttgaggccaggacttttagaccatcttgggcaacatagtgagatctcatgtccataaataaataaatagatacatattaggttggtgcaaaagtaatggcaaaactgtaaatacttttgcaccaacctaatagctatctatctagctaaataaatagatggatggatggatataggtaatgggaagcagagctggggcttgatctttggcaatttaaaagtttttgtttttttttttctggaaaatactatttgattctataatcattgagtacttccaaagtgtcagttattgggctaggtgctgtctgtatttttgctttgcttttatccagcagtggctatagttttggttacgcttgccataccttcatactttgactaagtggaattaatttgtataaataaatttgtagaatcaaggtgaaggttcaaactaaccatgtaacactaactagcctgggtattcaaattttaaatctttgatagtaccatatttcagttaatttaaccaaagtagaaaatactacctgcttaaatatataacaaatgatttcacatcagttatgtaatttccattacatctcatcggaattcatgtagaaaatattattaaaagttgtacctaacttaccatagttaatatattttttattggatttccagatgtctttcatttattatgagtcaatataaatgttcttgttatctattctaatagttaattgtatttctccaaatcatttttcttttaagagtttagtagtcacatttttttttgtaaagataattttttgtaaagacgttaaagtgttcaggaaggaatacactaaaacttatgtattttatataaattatgactaagtttaatgtttgttttatagcttatcagtttgtggcctcttgcattcttttttccttaaacatatttcctgtttaaattacaggaagagatacattagatgagtgtggtttgagatacttgttagctatgcgcctacacacatgccttttgacatcgctgcctcctttataccgagtgcagctacttcatcaaggtaattcactcactgtttgaagctttgcacaacttttacttaatattggagcgatggggtgtatcatgtttgtgtgtaaacattaggtaagtcattacgtgcacacctatcacttggcttaagatctttctgtcacatagtacccacttaccatttttctatgtatccttcagctctattctgtgacttttgctcatctaactaagttttttagaatttatttactagagtagtagcttagggggtaaatgtggtatgcctgaggttgtaacccaaagtggctgtctacagagtagccctgaatatcttgatgtcttttctttgaaaaattatgtaaactttgctctgcgatgtgtttttatatttactttaatgtaagcattatgttctagttatttgccagcaagtaaagttgatgattcaggaagatctgccatattgataacagtggatttgtgtacttcaggcatactgctacacctgatttgagacataaggatttatatcagccttcgtattacagattaaaaaattgaaactatagaattaaaagtgacctgcccaggatacaggactatttattagaagagttgggagtgcgaatcccagtccagagcttatttcagtggactatatttcttttgaaaccaacatcttggaaagagtcccataatatacgtcttagtattatagaacctagaacactaggcttgatacactgttattcttacccatggcacttaccctttaacctatgaatgttctttgaaaacataactataaatagctatctgagattctgtgtctaaactatatttcatctgcccaatcctttgtttttgaaatagattttgctgaggtattttttctatttgaattatcactctaatgaataaccttgtaccttggcatgtaaatatttgcattcctgattatttcctcatgctagttttccagcagtggaattactgaatcaaaaggcatgaaaattcttcagtcttgataagtattaccaaaatgcccttcagaaatgtgctcatttacattcccagaagtttgtatacacgtactacgtaccaacaaaaattgaaaacaaaaaattataaaaaatataaaataaaaaagaagtttgatgatgccaaatctcaaccccattgcccacatttgatattaacattttaagcaatctatgccatttggataggtttttaaaatggtatctccacgttctcttaagttttagttttgggtgatagtcaagtggtattgaatcagttaatgacaattttgtacatttcctagggcagtctaaaacacttcaaatttctaaagctgtgtcaaattccattttccctttgactgcagttaaaacattggcgatgagaagtgactggtgttgtaggtgttggtcctgggagcagttttcagggaaaagttaagtagccagtacatagatagaaaagctgagaagagcaagagcagaggtaaactgcagagaatagcctgccattggtaggtaaataaaaagaagtgcctattcgtgcccctgttctttttcttccctaataacttttttcacctctgcaggttttcaaatacattcactgctcttaatcttactttctgaacctaattcttctgacatgtctgtgtgtatttttgtttcttcttataccaaaattttaattaatttaaggatatagaatgtaatatgctatgtattgtcattttatattatatattttatatcagcaaaattatgcattttgtgttgccgtatattagttgctgaagcagaatatcaattatttgataaagtaattctctcacagcagacagagatttaaatagtgaaaaaattagtctgcctttcaggttataaaaaactaaatttattttattaattttttctggtgttttcccctaaatttatagtggcagccaagacatgttgcattaattttgtggtatgattacaaacacagttgttatatgagtgttggcagtgggaaatttaaaagagttaagattgttattcaaaataatcataatagtttttattttatactttctaaagaaattacagtgaagcagtaattattagaaaagctttaaactatgtacaaaatctatatagtagttgaaaatggaaaaaattatgtgtaacaatatagatacttaatagcattgagaggcctatgttgtaatgtgactttcattgacctcagacatttctttgtttctaaaatgaattcatacagatggctacttggactagtttggcttctttccaaggcttcccagagttcttgccagcattcccattattgattaccattctgtgtggttcacattcattatgtttcgtttttacctgctgtaagtcgaatatcagtaagagcgttatcagtaattgaactgttgataaatccattagtacttaaaagtctaatagcgtcagtaaagattttgttgcctcttcaaacagcctagatccctgtcagtcttctcccaggtaaaaaaaaacaaacaaacccaaaacaaaaaacaatgttcaccaaaaagcatcagtattaggcagctttaaacttttaactgaaggcactaaaagcagaggaatgtacatcatgattgtaacttatccttattattttctggaactcttacgaagtttagagcttgctttgaagtgatatttagctccatggctagagagaagaatggggtagtggcactggaatcgacatccaggactgtgagccaagtgcttttgacttgaataaagctttcaccacactttccttcccctgggctcttgtgggggataacacaccttgtgtcctcttgggcgggccggattcacaggtcctggtgacagagaaacctggaatcgggcctgggccctaccttcctagttatgtgagcttgggcagctcttatgacctcttgataaatttggtgtaccgtacatgtgaatggcctgatattcaaatatttttctttctaatgattaagttttagtgtccctatttttgtaggggaaatgaaaacaaatgtttggggaaaaagagatttggattttatgtatcacattattgatcttgtattcagaaacttttatagtataaagtcctgaatgatgacagactgcctttcattctttctttctgcttcaaaattctttccaaaatgaatgcgtatgtgactgcatgaaaaattgtttttcttcttatttgatacagttacgcagattattattttatatttccaatttaggtgtctctacatgccattttgcctgggcttttcattctgaggctgaagaagaactgattaatatgattccagcaattcagagaggggacccccagtggtctgaattaagagctatgggcataggatggtgggtgaggaacattaacacgcttcgaagatgcattgaaaaggtaacttttctttagtggattttgagttatattaaaaaaaccttttcctaacgaaaaaaagatactatctcccagaaaacctgtagtgggaaatttgtttgtctatcttgaggtcttgagaatttttttttttttggagatggaatttcgctcttgtcgcctaggctggagtgcaatggtgtgatcttggctcactgtaacctctgcctcctgggttcaagcgattttcctgcctcagccttctgagtaactgggactacaggcgtgcgccaccacatccagctaatttttgtatttttagtagagacagggtttcaccatgttggccaggatggtctcgaatccctgacctcaggcgatctgccctcctcggcctcccaaatggctgggattacaggcatgagccaccatgcctggtgagacttttttaaataaagttttttggagattacaaaaacttgacctttataaaatgtccatgcagtatgatattgtgtctttctatataggctgaatttataatatatccgtggaataataatattttctgttattagttgaggtatgccctggtttaagaaaatggaaaaatctaactttagaaagtaaacttgagttcttgtttgttatttacaatacattaaaaaactctttttatacaaaggactctctgcatcactagttgaataagtagcaaacgttctttgcacacttgaaatctcattggataaaaacagttttgatttgtatgtacttgaagaacatatctgtggcagcaagtgaaatggctatcaaagtttttaaggcaggtttttggagtcagttttctggtagattccttttaggaaaaaaattcagttcagctctctaccaggtttggtgccagttgcttttcataaataattccatgttatgttctaatcaaccccatgtcatcatctccattttacatatgatggaactaagattcagagaggatgggtaacaagcccaaactccagtcatttataaatgttagatttagcctgtgccttttctactttagcaggattaggaaagtggaattcttattcatattttccttttagtcctttggaattccctggagtacaatcagtggtactatatttgtgaagtatgaatttgtttctccgaaggatgcaaagaccttttcctgatttattccttaatagtagttccccagagaagactcaactggtaaacttatgtaaaatgcatattctccatcccataaccagagattttaatttggtagtggtagggctgaggtttcttcatcttaatcagcatcccatgattctggtgtgcatggttctcagatcacagttttaaatgtgagtataaaagtattattttactgttacgtgtaaggctgccaacaaaatatcagtatttcttttctcaaaataagcacagatataagaaggaattcattcctgcaccaactaaaaaatgtgatctctgatgtacaggaaaagttaattgttaaaggatataaatgatacagtttctacattaaatgttttatattccaaagcactggataaaagaggacatactttatctgaaatgtttcagatgtatcccacaaagattttacttcttgtcaacatgtgtcttgtcattatgattatctgtgataatatacacatgatttatttccacaagtaatttatttcttaaaattaaatcaaagggatatgtacattttctgcctcaaaatgtatattataaatcagctgaatacaaataaaattcctctaaaaattatctaacatattgaagcactaagttaaatgatagggggcagacaacacaattaaaagggggaagggaaaagagtattgagagtaaagcattttcttttttctttttctttctttctttcttttttttttctttgagacagagtcttgcactgtcgcccaggctggattgcaatggtgtgatttcggctcactgcaacctcctcttcctgggttgaagcaattctcccaaccagcctccaagtagctgggactacaggcgtgcgccaccatgcctggctaatttttgtagtattagtagagacggggtttcaccacgttggccagactgccctcgaactcctgacctcaagtgatctgcctgtctcggcctcccaaaatgctgggattacaggcatgaaccactgcgtccggcccgagagtaaagcattttcatgatgtaattttagatgtcttttccctttctcccataccttagtattatagcttcctgctttgccatcaatgtgagctaattaataaaacatccactgttgttttgtcattatgcctttcaacttaatgatttgcagaggctatatctcagcatcttggaaaaataaggtatggcctatatgctcttatgtttaagacagtatgattgcatacaatataacatgttgaattttcaagaaaaagctcacatctattgaatattctgccttctttattgctttctatgttagtttcagttctacgtggtttctattcccttttctaacccttactgtgtgactgtaggcaattcacttaacctttctgtctcagtcactttatctataaaatgggaataatgatagtgcctcatggtttgtagtgatgcaataagataacaaaaggtgcatagactcgtgcccaggacgtggtaaatagtcaataagtgctggctgtaattaggatttttaccataattactggcttgcgaatggttatctctaggagcatgtattaatattataacctactggagattgtgaaacagaaccaactttttctgtctccacagtttctatcagccatggaagtagcaggggaacattattgttgattaattgattgtaattcttatgtcaaattgtgaatttaatattttatttatcatttaggttgccaaagcttcttttcaaaggaacaatgatgccttagatgctgcactattctacctttcaatgaagaagaaagcagtagtgtggggtctgtttaggtaagttgccttgacacttaacgtgattcaacagaatgaagattgtgctgtgagtaagaaacctaatgcttttgaaaataattaggtatatgagcttcatcaaatccacttctatgcgacctggttcctttagctgaaaaaaatgggtaaaatatcttttcagcttaatctagaggatgggatgttttaaaagttgataaaagcactttgcaaagtaaaaaatgctgtttcctatttatgtatacataaggcattattgaccttccttcttagaagaagtgaagagatgcttgataacaaatgcctgtccttgaagttattgttcttcttttagatttctgtttgaggtttttattttatattattatacattctgtagaacattttaaatttggtttaaccactttatgtttatgctcggtccccaggtcacagcatgatgaaaaaatgacaacatttttcagccacaactttaatgaagatagatggcgaaaagctgctttgaaaaatgctttttccttacttggaaaacaacgctttgaacaatcggctgcttttttcttgctagctggttcattgaaagatgccatagaggtataaataagaaaacacactatataatacttgtaaaagattgaaaacctaagaaggttgtagaggagattgtaacttttggtcatatgtttgttaggacacagaataactacagaggttgctgtacttaaaatagtggcactgtggtaaaggaaaatatgaataaattcaagggagaaacaaatgaaaaatttcaggctgggcatggtggctcacgcctgtaatcccagctctttgggaggccagggaaggtagatcacctgaggtcaggagttcaagaccagcctggccaacatagcaaaactctatctctactaaaaatacaaaaattagccaggtgtggtggcacatacctatagtcccagctactcgggaggctgaggcaagagaatcacttgaacccgagaggcggaggttgcagtgaggtgagattgtgccactacactccagcctgggcgacagagtgagactccatctcaaaaagaaaaaaagaaaaatttcatatatggcacattgcatttcaagactatgtgtaaaatatatgaaaaaaatgctgaaaaatagtttatgaatgtcttcttccagaccatcttgtgattctgaactgtttaaagtacataggtcacaacctccttattctgtgcagaaaggcagatacattaagctgtttttttaaatgaaattcataaataaggaactgaaactccagtttgtactgttttataatagtttataatattagaatattatattagaaaacgatgtgaggaggtaaaacttcccactttttgatatgtaatcctagcagctgattatgagagtaattacaaatgtttgtgtttacttctgatatcttcctcttagattactatcatgaacaatatgaacaggtaaaggacaaatacagttgggaataatatatgatagaaaaacaggaaatattcaattaagtgaaagtactttagtattttaaatttagaattagttgggtttttttttacaattatcccaggcatatgagtttctttttttaaataacaaatacttaagattttaaaattggaagtttagcttagaagatattcaagcaaagagaagtgttgactgagagatgctcatattgcctaaatgacctcaaatgctcagaactggtagttgcattagaatacaggctcccagagactatgaatagaacatatggctgtatttcataatttatttactatttaaatatgaggcagatagtaataattatgattatgcagaaatatgtttggaaattaagaggaagtggtatataaattctagtgtcatatatagtatttaatttaaaaatgaatgttatttaagttgatcttaagtctgagatgatattaatatactttgtttcatgcttattttataaatgatctgtctagtttggaagctactgggttccaacctgttactctttttgctattctttaatctcctatcaatcatttaactacccttcactgtcccttcgcccaccattaggatataaatggtagataatttcagggtattgatgggatatttcatctctctaaataattatcattaagtaagataagtattaatatttaaatttgcaggtatgtcttgaaaaaatggaagatattcagctagccatggttattgcccgtttatatgaatctgaatttgagacttcatccacttatatatccatcctaaatcagaagattttgggttgccaaaaggatggctcaggattcagttgcaaaagattacatcctgatcctttcctgcgtagtcttgcctattgggtaatgaaagattacacccgagccttggacacattactggaacaaacaccaaaggaggatgatgaacatcaaggtaggacgttttgtggatttcttttttttcttttttaaaggaagagatactttctgaactaatgttcacttagattaagaaaaatcattaccagatttgcttttcaactttgagaatttattattaaaatttcttgtgtgtctaaaggattagataggattaccatcctattctaattacgtatatatttaacaagcatacaaaatgtttgccacattctgtagctctttttacataatcatatagccattttttttaaatggaaattttggctgttacacgtattggtttgtcacatgggcctggaaaaactttatgcctctgtggtaaattttcttttttccttgttatcctaaataatttagatattacaagcacttaaaggatatttatcagcattgttttcaataatttgaaaggaatggaacattttaagtttttgtcaatagaatagttaaatacgttttaatatatccacatatagaaacagtgtgtcattaaaaattgaggtagatacatatgttaatatgtgctgtatttttaagtgaaaaaaagtaagatgcacagcagtgtggttcttgttgcatttggcatatgtatgttgtacaaacatgcacctgaatgtgcacacatgttatgtctgcctcctccatttcctttggttgtttcctgaaacaaatcataagaaatgaaatactggtcattggtcactggctaccttttgggaataaaaatgaggagatccttgtctttgacttttgacaacttgaccatgtgccttggagaggatctttttaggttgaatctatttgggagtatttgaacaccctggacctagatgcctatctctttcccaagacttgggaattttgggctgttactttattaaatgtgttttcctcaccttttcccttttcttcttcttctggaatgcccataatatgaatatttgtttacttaatagtgtcccataaatcctgtaggctttcttcattcttttttttctgttcctccttcttcctttttttttttttttttggtttgcctgagttatttcaaaagacctgttttcaagttcagaaattctttcttctgctcgatctagtctgttgttgaagctcttgattatattttttatttcattcattgaattttttagctctagtatttctgtttggttcttttgtatgatatctatctccttggtgaatttcaaattcacatcatgtattctttgcctgatttcatttagttgtatatctgtattcttttgtatctgaatgagtttccttaagactatgatttccttaagaattatttttctggcatttcatgtttccttgtgactaaggtctgttactggagaattagtattttcctttccattcttttcctttggtgtcatatttccttgctttctcatggttggtgtgtttctacattgatttctatgtatctggcagaaaaagttgcctcttctaattttatggagtaggtttcatagggaaagacttgttactatgaataggtcctgaggtgttggtttggtggagtgcattggttagatggatacagtagtgtagtctccatgtagcttcttcacctgtaatccacattagtggcatttgcaatcctctcagttgcctaggctgaaagagtttgcggtgatggccatgtagctttgccaggtgggctcgctgggcagtttttcaggttggggtgcatatgtgcacacaatgggtcagccagcttagggtctggttggctgggattggggccacaggtctgttactctggccaggagtgtgggtacatggtcacttggccagcctggaggtgtgcctgccagaagcagcccacagggctcatatgtggcctcacggctactcagctggcctggggttttgtctgttaggggtggggataaggctatttctcaggcccatgacacgattgcatggctgctcagctggcctgggggtgtttctgcaggtgttgcccatgggttatttgtatacctgtgatgcaggtgcagggctgctcagctggtctggtactatgttagctggggtggcagtgaggctgctcctcaggcctgaggtgtgggcataaggctgctcagctggcatgggggcgtttctgttaggggctcatggggctatttctcaggtctgagactggtgcaaggctgttcagctggctaaggggtgtgcacactgggagcagcctgcagggctgtttgaccaggctgggatgtgtccaccagggatagcccacagggccgtggaagtgggctcttggctgcttggctggcctggtggtgtgctgccaggggcggctcgaaggactatttctcaggcgttgattgcaggcgcagggcctttggcaggccagaactctgagtgcagggagcaggggcgctgcacgctgtttctgaggtcctgagtgtgggcatgtagctgctttgctggcctgggggcatatcagctgctcgtaggcttggagacctctcccatttgggggagggtatgtatgtagtggtttggctggctcaagggcaggttcaccctgggcaagactgccagattgtttctctgaccaaaagtgtgatggtaggggttgatttccctgccatgcaggaccaaagtcatagccagtcatggtcctaggctctgcatagctgggattgtagcattcagctacccatgtaggcttggaatgaagacgggtccccagtgttggagaggtacagtgactcctggcccccagagcagtgcgcatgccagaggtgactggtctcaagatagtgcttgtgctgcagcagcttggctcactggcggtaggtggagggcacacaccttatgctcctaatctgggtcagtgccgttgcgtgaacttctgacgtctctccaaactggacacagggcttgcaagtactatgggattcttctgttgtaaggactgtagatgtttgtggtggccatgagggctgatggggatcttctgtttaccttttcccctctgcaatgagaagttcttcctgactgtgggcagatccagtctgggtgggggagatagggctgcagaggccgggtacctccacactgctctcctagacttgcagtcaccacaggtgcatctccactcccctgctgcactctagtgctctccctttgacactccagtcaaatcttagctgtttattcattgccttggtcctttcttttcggaggatgaatgccaggtgtgtctagcagccatcttgctggcatcattctcttggtttatttttatggatgctcagattgttctttcacaaatgggaacttcttcaggtttctgaattcttctggcattatttcttgatagttttcttgctttctggtactacaaaatgtttaagggtcatcttgtacatttcctgccccagacctggaaatgaccattcctccaaagcattctgcttccttttagtggggaataatatttagaaactatagtttgggcaccaggatcctcattggtactaatcttgtcataatttctagactattgcaatgaatggaattaggaaattttttttccttagaatttaggagtttaccctgctatttctcatgcacatatagattatagggttctttcttcttagatgttaagtttgtgtcttataatgaaatgtttggattctcatggcatgaacatagttatttgctatctatgtgcatataagtttcagaataataatatagatatttttataataacatgattctgaacataatttaagcttttttgcagaatttttttgttttatggtacattctgctaaggatgtacagtcaaattacttgtttttaactcactttttagagttcatctctgtgtgattatgctaccaacttgatagactgatttgtttaattttgccttttgtgaattgtggtttagatttggttttattttaaaattatgtaaaatgttgacatggtgttaaaataaaatatataaaaccagtgtattttcagagaaatctagctctttttttccctgttttgctctccccttttaaggaatcaattaaaattttttgtgtttgtcttccatttaaaaatgataagccaatatgcatgagtgtgtatttgtatttcctcttcactgtcttagatagataaaaggtagcttactacatgtactttctgcatcttctttttcttagtgtatcctggacatcactctatagtgatgggaatcactccgtagcatattgggaaattctttctatttcagctgtacagttgtaatgattgtatatgccatagtgtaacctatcgtaggttaatatttacatgttgtttttttgaagaaatgctgacgtattttattgttttgtaatgtaaatacatattaacacaatgctttgtgattttatctgtttgatttctatagttatcatcaagtcttgtaacccggtggcatttagtttttataactaccttcgaactcatcctttgctcattcgaagaaatcttgcctcccctgaaggaactttggcaaccttaggtctcaaaactgagaagaactttgttgataaaattaacctcatagaaagaaaattattctttaccactgcaaatgctcattttaaagttggatgccctgttttagccttggaggtactctccaaaattccaaaagtaaccaaaacatctgccttatctgcaaaaaaagatcagcctgacttcatttctcacaggatggatgatgtaccttcacattcaaaagctctgagtgatggcaatggaagttctggcattgaatggtcaaatgtaacttcatcacagtatgactggagtcagccaatagtaaaagttgatgaggaacctcttaatcttgattggggtgaagatcacgacagtgccttagatgaagaggaagacgatgctgttggtttagtgatgaaaagtacagatgccagggaaaaagataaacaatcagatcagaaggcctcagaccctaacatgttattaacacctcaggaagaggatgatcctgaaggtgatactgaagttgatgtgattgctgaacaactaaaattcagagcttgtttaaagatccttatgactgaattaagaacattggctacaggttatgaagtagatggaggaaaactcagatttcaactctataactggcttgaaaaggaaattgctgccttgcatgagatatgtaatcatgaatcagttattaaagagtattccagtaagacatattccaaagtagagagtgatctgctggatcaggaagaaatggtagacaaaccagatattggttcctatgagcgccatcaaatagaaagaagaagattgcaggccaaacgagagcatgcagaaagacgaaagtcgtggttgcagaaaaaccaagatctcctgagagtatttctcagctactgtagccttcatggggcccaaggtggtggtttggcttcagtaaggatggaactcaaatttttgctacaagaatcacaacaggtgtgaatatcacttttttttcaatcttggttatttcagtaatttcagtagctcttccagttatagctataaagctcttttactactttttactagttaatctaaatatgttcagctcctctctttataggaggcagatatttatactctatgtgtcttagactgaagttttgataataaggagtaggcttaacagcttgagagtattcttgtgtcatatttatctatataccatctacatctagcatagtacctggtacatactgggtgctcaataaatttgtgtagaatgagtgagcgaacatattccctttacacaatgtttatcaccagtatttctgtcagagaactgataaaattttttaaactactttgaaaaaaataattcactatcacccacaggaaactacagtaaagcagctccagtctccactaccactgcctaccaccctacctctgctttcagcaagtattgcgtcaacaaaaacagtcatagctaatcctgtattgtacttaaataatcacatccatgatatactttatactattgttcagatgaaaacaccacctcatcccagtattgaagatgtgaaggtaatgtaaagtttatgatcatttgatattatacaccctgagaaggtaaatatgttatacctgtcttttaattcgaacttaggggaaatatttcaaagtgctacctttctcactcatgatcagttcaagactattagtccaatgaatgtaatttaaaagtaagtgttcttacttctggagaagttattgtcttcctttaagacagacaaatacttttggcaataaaactaattttcttgacagtattcttgctacttaatatccctttagatcctccattccccttaaatgaaccattaagttggaaatatgactatttgtttacatgccaagatattatgaaaatacaagttggggagtatctgggagggaagcatgactggtcacaaatggtcccagagagagtgtccttattactgtttccttggtggttgtgtttattggaggcaatagttagaggcaatcagagttttggcagttactactgcgaactatattgataccctgtgctaagatcttaaaaactgatacagtccaagaaacactagggagcttggcaggatctggggagctagctgatcagacttttcactgtcccagcctgagtgtatttgtgctatgctttttccagttctactggctgatgcacaattcaggtcccctgttttcttattttttatttgttttgtttgacaggcacatttactctctggcagcacattcttctaaaggcctggtcataaccaattagggacttctcatccatattatgaattaacctgtattagtattttagcagagattatttaaatcatttgttaggtgaatagggacacgcagaaaaggcataaaaagcatatgaattcaaagtaaacatttctagttcctagacatttggataaggctttcaaagagtaatctgtataaggtatgaaactgtttctaaggtcccttcaaatttaaagattttgtgagtctgaaaatattgattcagtatagcatttcagggtggtgggtttttttttaattatatggagaaatttaaaactttctaaatgtaaaattctaagactgtcctcaattcatgagtaccaagtaaattactttctggaaaatctgctgtttcacacagtgattgacacatttactaaaaagatttaattcattttcattgataagattaagtgtttattttcatcaaggcgaatttcgtgaggcaagcttaaataaaaactctgaaaattctattcttattttcttctgcttttttttaaatattactatttaagctaattgttagggtaggacaaatgcctgtaatatgaacattagcactttgctcagggcctcgtaaacggcaggctcacagtaagtaactgtttgattaaaatgtgtctgaaacaatcagctttattgtggcatgtgtataaaggtgggtgacagttactttagaagatttaaagcagagttagtagtctcatctaggattcagtcttatttatgatgttgctaggtttcctggatgttttctaatttttgaaatattactgttgtgtagaaatgttagtacaaaatgtaattgtgactgttttggttttaggtgcacacacttcattcactagcagcatcactttctgcatcaatttaccaagcattatgtgacagtcatagctacaggtaaaaaaaaatcacccaaaatagtattaatacagcaaaaacattaaactgttccagagttatattaagtttctatttcctagggactgaaaaatccctaaatatgacagccatgatattttaatacatgcgagagaatcagaaataaaataattatttgtttagttgtcacctagtagtcacagagaaatatagaaagtaacaaatagtaaatgtaaattaccatcattaccatcctttttgtttttaagaaagaagagtttactgtccataataacttataatatgaaattttctaattgtttttccttagaaacaatttctttttgcattggattagcagctatttaactaattatccattgaaataaaaaatacttttgaaaaatgaaaaagtacattcctaaaatggaattatttaaattacttttacctacccatttacatatgatgtaaaagtctttggaagtgatatcaattagaagaaatggattgaatttttctaaatgtataattgccttcattagtgtgtactttgcattttaatgactagagcaatgtaagtagcaggaaattgaatcacttggaaagataacctagatttaaatgaataatgttaataaatgaaaagtttataatagtagattcacattaaattgatattaaatatatttctggctttctttcttgtaatggtagcagccttttgtgggaacatttggtatcaagtaaagaattatctatcaaaatggcctgtactctgattgtaacttaattaggctgtgtctaaataactccaaagattggaaatgtaaataaggaaaaaagttgatttagttgactgttgtcatctaaatgatcaaagataacttgtttgatgtcagtcaccattaaaatggcaccaaatgaaaatgcaaatacattgtttttaaatatatattttccagttggtcggctatgatttactagactcagcttgactttccgcttttatattttccccaacttcacaaagatagccattatagagagggaagtaaatattattaaataatatttagggacatttggttttaggtttaggtatttctaaaatgtgattctctgggttttagttcataactttaatttagggttaaacttgcacaactttgcagagaaaagaaatgcaacctactagtccctgaaactttctgcctactgtatcctagtaccagcagtagtctccttacctcagactttgtaaaaacacaaaataaaaattactgcaaatagaaaagattttaaagtattaaagtggcatctggaaaaaattctaaaggaataagtgtcatctgcccaacataataaaatttgttactttgtttaaaagaaacaataagcatttgtaactaatttcagtaattttctaaaataaatttttattagaacagtgaatgcattttaagaatttttgtttcttaaaataggtgtctaaaatagatgatatacataaagtgcaattttttattacctctcaggatgataaataactgaacctatttgttttagcagtcaaacagaaggaaatcagtttacaggaatggcttatcaaggacttcttttaagtgatcgtagaagactaaggacagaaagcattgaagaacacgcaacaccaaattcatctcctgctcaatggcctggtgagaatttaaatgattaaaaaaaaaaaatcttctagttggcaatttcttcctaaaagcctactgaccagtttcctgcttgttgctggatttagtgagtggttcctttctttctttgttttttgatgatgtttttctgctatggattaggaactattaagtactgcaatattgtctgaagactcaggaagttaaggcttcataaaaccagctatgttaaccaacataaaaaagcaatgtcttaacatccttcataaggatggagcacattatctttcttagaaatgttaaattagagtcttagaaaatcacagacatattttcacagacataccatagaaaatacagttagttgttctcgggcgtgtaaatttatgtattggggtaggagtgactattctgtggtacatatatcatgctgtctgacagtcctttttttcttgttggctctctttctcattctctacatcagttgtttcaaaacttctccactctcttcaatatcctaagtgtatatttcagattactgtaaccattgccttgtagaaacacattgttttcattttaacctcttatttcaaaataatttcagacttgcaaaaaattgcaaacataatactaaatttcacccagattccccaaatgttaacattttaccatgcttgctttgtcattcatttcttctctctcactcacttgctgtttgtgtatctaagtgtattttttttgaaaaatttgagagtaagttgcagaccagatatccctttccatctaaacatttcaatgtgtgtttcctataaacagacattctcacataattatccaatttaacatttatgttctctaatctacagaccttttttgaattttgccagttgtcccactaatgtgcttttgggggcccatatgtaacatttagttgtcatgtctcattagtctcctcttatattgagtaaagtcttccttctttctctttcacaactttgacacttttgaagagtaccagccagttgtttttttaagtgtccctcaatttgggcatttctgattttttttctatctttccttatgtttatttattttattttattttttgagacagagtcttgctctgtcgcccaggctggagtgcagtggcgcaatctcggctcactgcaacttccgcctcctgggttcaagcaattctcctgtctcagcctcctgagtagctgggactatagacgcataacaccatgaccggctaattattttgtatttttagtaaagacagggtttcaccatattggtcaggctggtctcgaactcctgacctcaggtgatccacctgtcttggcctcccaaagtgctgggattacaggtgtgagccaccgtgcccagccctgatttttttcttaatgttggattcaggttacgtattttttggcagggataccacaaaaaagatgtgtctttctcagtaggagatatcaagaggcatatgatgtcatttggccccagctgctgttaactttgatcacttgttaaggtggtttctgccaagtttctccattgtaaagttactttttttttcctttgtaattaatcagtatcttgtgaagagttagtttgagactgtgtaaaatattatactttcacttgctaattttagcatctagtgatgatttttgcctgaatcaggtattactgtggggttactagctggtgattttctaacactatcactcattttatgtattagttgaaattgtactttaaggaagagcttccccttcttaccttttgtttatctactcatttattatatcagtgtagacaaatggatgattttattctataggctataatccattcctatcttgtttattttgttgctcaaattatggaaatattttgtaaaatataaatgcataattttggataagttgcaaatttggatgttttttccttctggtgcttcatcctgacatacgtcttatgattttatatacccttataggtgtgagctcacttattaatcttttgagttcagcccaagatgaagaccagccaaaactgaacattttgctatgtgaagctgttgttgctgtttacttaagtttattgatacatgctcttgccacaaattcctccagtgaattatttcggcttgcagcccacccattaaataatcgaatgtgggctgctgtttttggaggcggtgtaaaacttgttgtgaaacctcgaagacaatcagaaaatatttcaggtaagatacgtttgataccagtaatgtatgtaaatgttaatcattttgaatgttaaaattttttttaatgtttcaagaaatttcactttgaaaataagcgatgcttaaagtataatcactcttgttatgacagcaaataattaaacccatgatataataaacatatagtttgttacttttatttttatagaaataacatttttgaggttgataaagcaggacatgtttgaagaagattaaaaatagaggaaaggtaaaggtaaatacagaaaaaatgttaaggaacaaagtcatacaaaaagagtagttcctaagacaataaaatgaaaaaaaaaaagcaaaaacaaaacggatagttcttaattacagaaagaagaaaatttaagtaagtgttcaaaatctttagcgcataccagcagttggcttcagattaaatgtatggtcatgtgcaagatagccattccaatcatacacacagtttttaaattctatttttttattctccaaaataggttcctttagtcttcaatgtgatagtattattccattttccttgtgtgtttcttcttccctcatggccagaatatatttttcatcccacttttgaaaatggtatgatatggtgaggtatagactgatgccgcaggaaagatttctatcttgatgctgatatatagaaatcatcttaattcatccttagaaatggacatattacagatgagaaatcagtggcacacaagtttaatgacactaacctctgtcttcattgtctgtgattgagttaaataaataggttcctgtgtaagtcattgtaagggagatgatcttatcaactcccactgcttccattcccatcaaatgtggatatctgaatctctttcttgctgcttggttatagtccactttaaacttaaaagtttttctccaaaattgtttatttctctgcctgagttttctgattttttgttcatggtaatttatccatcaaatcatccatgcttaaaacctgccagtacatattaatatttgcattaatttattcacttaacacctatcaggcaattaacaaagatatttcaggtaatgataagaactgtgataaaaatggagtaagtggaaagacggtgatgagggaatgggaatggaccagtttagttaaggtggttggaagacatatttctgatgagatagcatttgaggagagctgtaaggaagttgggaatcacaccatgtggatatctgagaccagagcattccaggcagatgaatgcaaaggtcctgaggtagaattgagtttggccttttccaagaactacccagggaccatcatggctgtcatgaagagggagtgttgtaggagatgagaatagaagagtagctggggcaagttcctttaggatcatggtaaaagcgttagttgttctaaagagaggaggtgacagaatctgattcagcttttcaacagaaccgctctagctgctttgtggagaatagactgggtaacataaataagagtagggaggctggtggtagggaggctagttcacttaaaagataattgtgggttaccatcaaggatgaaaggatcaacaaagtgtggtatattcgtgcaatggagtgttactcagctataaaaggaatgaagtactaatgcatactataatctgtatgaacttcaaaaataggctaagccaaagaagccagacacaaaaagtctcatattgtctggctccatttatatgaaatatcctgaataggtaaatccatagagacagaaagtagactgtggttgccatgggctagggggagggagaaataaggagtgactgcttatttggtatagtgtttccttttggggtgaggagaatgctttgaaactagatagaggtggtggttgcatgacatgttaaatgtactaaatatcactgaattgtacactttaaaattgttaattttattttatgtaaaatttgcctcaattaaaaagaaataatagtggttcatcctagggtgttagttatggtcagagtgaaaagtgatcatattctgggtatagtttgaggttagagccaatggatttgttgatgaattgtgtctggggtagggaagatagaagagttgagataaaattattttctgtgatggggaggtttaggagaggagcaggttgacttctactttctggccctcccatacccaattcctgaatccttttgctatttcttttgtgtatcactcatatacaacccttcctctactttttaccacccaccatattagtgcaggctgttcttatgtcatcttccatcttcctctctaattgatcagacaagccatacctcattgtgtgactaaaacttaagaggtgttagtgagaattgcccaaaacataagttcccaggttcatagccacagacttgtcctaacctaactctagactgttgttgatattacttccctccatgactcctgtctaccaaaagtaatttactcctcatttacccaaaccttctttgattatttgtttatattgtccttttccattttcccattgaacttctgcccttcttttaaggcacactattaaattctacatattcagtgaatctttcttgaacctcatagccagggataatcagtcaatcactcactttaatatttattgaatataccacttatttagtgtattttatatagaattactttaatccttattttagggagcacatggcaagataggctttaatgctttatctccatctgtatctctgccatgactgctggaaagctgattcagtaactagaaaagtttagaagcacaggaataagtaatttagtttagaccaaaacatggcaagagtaggataaaaagaaagcttaactctatcaattaacaatggaaaatgaatgctagatttttttttccttctatcttcatttagcacctcctgtcctttctgaagacatagataaacaccgtaggagatttaacatgagaatgctcgtccctggaaggcctgtaaaagatgctaccccaccaccggtgcctgcagaaagaccatcttacaaagaaaaatttattcctcccgaacttagtatgtgggattattttgttgcaaaggtaaggagtgtgaggaatgcaagctttaagagaagtctatcatctattttattaactcttgcatgtgtctcacataggaatgatggggtagcttttggattgaatcaccatagtttagacgtttaatttattaagtccagaaactgaatagtcatagtaaattcgaggatgatcagttacctgatgatgtaggagacaaattaaaatcacatgggagttatgtataaattagaagtcagcttattacataatcagcaccatctttttcgagtgactggaatacttgtatctaccacctagacacccctcttctaattatcagtggctcccttggtaagcatggaattagaatagaaggagatggatggacatttggcggttttatcaggccatgatgaggccccatgatacatctctgttttcccagcgcaaaggaaacttctcaggggatcagaatactcatggtgactagatctggtatagccccatttcataccatgctgggtgcatgctaatgtttgcttttctgcactttgctcttttgagctcatgattctccttctgttggtatgtttccctctttacatgtgttaactctgttgttaccttgctgtgcatacacatgagggaatacatctccagagtcatgcctcttcccatttttagatttttattagatctcagagttattgaggcgctgatcccgctccgtttttttgtatgctaagctgatccttaaaaagtctttcaacatgagtttggaagctttgttttgttatctaaagactctgaggccaggtgcagtggctcatacctgtaacctcagcactttgggaggttgaggtggaaggattgcttacatccaggagtttgagaccagcctggacaacatagaccatgtctctgccaaaaaaattttaaaacgtaggtgcagtgctgtttgcctgtagttctagctgcttgaaaggctgaggtgagaggattgcttgagtccaggaggtcagcgtggcagtgagccatgattgtgccactgcacaccagcctgggtgtcggactgagacagtgtctcaaaaaaaaagactttggttacgtcagtggttctcaaagtgtggtctcagaaccggcagcatcggcattccttgggaacttgtttgaaatgcagattcttgggtcttccctcagacccctcaatcagaaactctgggagtgagaaccaacaatctatgtcttaacaagctctccagatggttctaatgtgtgctgaagtttgagaactatgagcttaggcacattgtgagtgcagatttccaggtttacactctatcagggtccgagttatacttccagagtcattctggcctatcccttaaggctgccaattgagttgcacttagttgtatttagctaataaaccagggaaataataaagtactcttaaaaatgtataggcagttcccactcctacctttttaaaatttttatttgccacgaatgaaagctcattgcatcattaatgtgagtgataacaacattaagatttgtaaatggtaatgtgctaaatttttgtttttcaaaaatgtttcctcctgatatatgttctgaaaatttggaaaatgcaaaatattataaagaagggaaatagcactcatctgtgcaacaaagataactgttaccattgtggccaatttactattaatcttttttcctcagattaaaaaaatgtataattggatcagtatatgtagttttttttctgttaacattaacaaggtaaacagtttttatgccattaaaaacttatatagctgtcattttaaaaacttcagtgtagaaaacttccaacatacacaaaaggagagataatagcatatgaatcttttatctaccatcatgtagcttcaaaaattatctactcatggacagtcttgtttcatttatacctctccccactactttgtttggaagcaaatccaaacatcatgaaatttcattcaaaaatatttcattatttatttttgaaaaaaaaaaaggattttaaatagatctacattagtgttacacccacagaagcacacccacaattctttaatattatcacatattcagacagtattcacatttcaccagttgcatcttaaatgtttttatatagttgatttgttcaaatcaggatctaaaatatgattcataccttgcaagtggttgctatatcttcagtctcttttaatctataggctccacctctctctctctctctctctctttttttaacttaactcccacctttttcgtttgccctgaaagaattttgacctttagaatttttcaatggattttgctgatggcatcaccatattttgttcctctgaatcttgtcaagtgaaaattaaatccaatttcattctgattggataggaagagggagtacaggattaacttcataggtggttttgtatatttctgtcaggaagctttttatgattttagttgatctttgcctacatttattatttcagtgaaagttttaaattatgataatataatcctgtcattcatttttcatgtatttgctggaatgtctcttcatcaacctattcaattaccctgaagtacattttgagtcggaaagacaggataaatgctttattcttttgcttttgtgtaccagttttcaaaatgatgagttggttcccaagcatccttcagaggaggccagtgagttttgttttgctttcagctttgttatgaacttatagatttaaacatattttatatgttttaatctattgcagttatttttttctcatggggactcagattatccatctttgccagtgagagcctcttccacaattggctccgaatctttttgagattattccactagtgtttgagtttgcctgctttctagttttattctaggctaatcatgtatatttcctgcccgtgactgagaacaatcacttttttgaaataacctggttcctttttgtgagaaattatatttagaaactacagacagatgctggggtgctcgctcttacttggttgatcattgtttctagataagcatcaattatagtgaccatgtaacttttcactttgttagtgatttgatgtttaaaatgccaagaatagtatcttttaaaatatgtcttgttcatgagcagattatttccttaagaagtactaggtcaggcccggcatggtggctcacgcctgtaatcccagcactttgggaggccaaggtgggcagatcatgaggtcaggagattgggaccatcctggctaacacggtgaaaccccgtctctactaaaaatacaaaaaattagccgggcgtggtggcaggtgcctgtagtcccagctactcgggaggctgaggcaggagaatggcgtgaacccgggaggcggagcttgcagtgagccaagatcgtgccactgcgctctagcctgggcaacagagtgagactccgtctcaaaaaaaaaaaaaaagaagtactaggtccaaggctataaacttaaataaggcttttaatacatattgccagattattttccacattactaatttgtactctcttgagaatagtgagaggatgcatctaactttacccccttattagcattaagtattcctttttcatttttgttaatttgatagattaaatgatttttattttctgttagtgacattaaaattttaatgatcttattgccatttgattttccagtttgaggtattgactgttcatattcttacctaaattatctgttgagattatggtatttttcctttttctggatactttatctagagatattattaatttatcttgttaagctttttctagtttatttgctttaaaattttgtttattatgcatttgaagttttaaaaagtttatcatgcacagaaattttaaaaagtttaaaaattagatctatccatacatttccttattgattacattgtttttcagcagaagtcttttccactaataaatgtgtacatttattttaccttccttctctgtttcctcctgttctttttctttctcctcctccttaacttttaattctcttatttatctagaataaagtgaggaacagactggatcagacttcatctcccattcccacacttagctaactagttgttccattattatttattaaataatctttctttttctcccactgacttaagatgttacctttgtcagattaacttcttatacgtgtatgatttttgtattatatttttgcatcaatctagactacatttttcttacttagtttaatatccactaaaaaaaatgggattttttttatttaaaaaaaattccccagctaatctcatctattttttcttctctacgaacttcagaatcattttaaagttccaaaacaggaagagaaattcacagggagatttttattgaaattacttaaagcctgtgtaaattaacttataaagaattacagtttttacacatttcagtccttcccttcatataattttataaagatttataatttccttcacaatagctctctcacagctttcatagtttgtccttttgtatttctttagacttttctaactatttattgctgatctataagaagaaaactattgattaaaaaaaatttcacatctagctattcagttattgaatatgagagttttaccttgtcatcttgacttttgtagatgtagcattatctgcaaaagaaaatttttacttatgctgacaccatttaaaatgtttacttttatgttagaacaaaaataattatatactaaaaatattttctatattaaatatataatacatgttatataaaatatattttatatgtttatgaaattataatctttaaaaaaataattttaccttttattgcagccatttcttcctttgtctgatagtggtgttatatatgattctgatgaaagcattcatagtgatgaagaagatgatgcctttttttcagatacacaaatacaggagcaccaagatccaaattcctataggtaaataagacttttctttctctcattttttttttggcttttctttttgtagaaaatatcaatgttattaattttaaataacattattatcctgaatttatataagaaatgacttatgtttccaggttacaaattctacacctttgaggtcaatgtctacatagtgttttctccacctccaaagactagcttttatggagagtgcaaacacaagcatctttagtgaggaaaaaatatgtaactcatggatatactattagagtttaatatataaattattggtatactattaggtttcatgtgactatgtggttaatctttttccacgaggtaattttcagcaagtgtaatatagtattgcaagttttttgtattcagtgaccacagaggtgccatttttgcatagtaaatttcaatgacagctttttttctgggttggagagtgggctaaacagttggcagggaacaccactctgtttctcccatgattttatttttcacttaaagactctttttgcccctccttgaacagctgggctcttctacatttgacaatggttaaactagcacttcacaatgtcaagaatttctttcctattgctggactggaattctctggtgagtttggaatttaaaaattaatgttattaagtataataaattgccgtcaagtttctctttacaaaatctatatataaggtcatttggtacttaaaaaatagtgcattagatattttataaagtcttgtttattttaggctccaatctgtgactttatttttatttttttagatagagtctcgctctgttgcccagactgtagtgcagtggtgtgatcagagctcactgcaaactccgcctcgtaggctcaagccatcctcccacctcagtctcctgagtagctgggactatagatgtgctaccatgctgggctaatttttgtattttttgtaagagacaaagttacatcatgttacccaggctggtcttgaactcctgggctcaaacgatccacctgccttggcctcctaaagtgctgagattacaagtgtgagccaccacacctggcttcagtctaatactttagtttatatcaagaatcactctctacacagaagattgagaaagagcagaaacccacttctgttttgttgaaagcattaagaatctaaactgtattacattaacatttgcagatttatttgtattttcagaagtattatctctgagaattcagattctataaatatttgggtgatgatcgatattttttattaaaataaataacatattctgtcaccttgtagagctgcctgtaacatcaccattaggtattgctgtgattaaaaacttggagaactgggaacagatcttgcaagagaaaatggatcagtttgaaggtccaccccctaactatatcaacacatatccaactgacctttcagtgggagctggaccagctattcttcgaaataaagcaatgctagaacctgaaaataccccattcaagtaagaaagctcttataatgctgataaagagcgtagcttaacttttctggaagacagtttggctaaatatgccaatatactttaaaacattcataattttgaacctgcagtcctatttttagcagaatacgcttaagaaaaatatcagaaatttgaatagaatttttcccagtattatctgtaattcatagacattccatttacataaaggaaaaagtctttattgtattaatttccggtgtggtgttttttgtttgtttgtttgtttgagacaagagacaaggtctcactctgtcacccaggatggagagcagtggtgcaatctcagctcactgcagcctcaacctcctgggctcaacccatctttttcacctctgcctcctgagtagctggaacaacaggcgagcgccatcggctaattttttttgtattttttgtagagacagggtttcaccatgttgcccacactggtctcaaactcctaggctcaagcagtccctggtcttggcctcccaaagtgctgggattacaggcatgtgccactgcgtatggcatatttatgttcttattgtcagaactcttacagaatttttttctaacaatctatatatgcaaataaggtgcttctgacttttgtcagtaatttaacagtaaacacattacaggtttttaactgatgttttgatcttttacctgccaatctaggtcccttttgataagcagcatgcttttttttttgaggtagtggaccctgattaatagtttttactattaaaataagcttgaaagaacaaagctttttagcttgttaggctgttagaatcggtatctatgacttgtattcattgttgatatgctttaaccaagagaaccaatataaagtataatttaaaaagagaataataagagattcatttgactctcagcttaactggttcattcagtgtaattagagaattagttgctagatgaaatgatttttaggagaactaaaaattaaaagtaaactgtacagttttgttgagcttaatgctgtgtcttctttgcaatagattatgaaggttttaaaaataaatatctttgcaatagattgtgaaggttttaaaaataaatatctgcaaatataaacatattttctatagactaaagtagtgtgatatgttaattttttttaataggtcccgggattcttctgcatttccagtcaaacgactttggcatttccttgttaaacaagaggtccttcaagagacatttattagatatattttcactaagaaaagaaagcagagtgaggtattttgagaaaaatattttctattgtaatttttctttagttttctttaacatttctaaggaaatcagtgcttgatttattctgaaattttctttctggttgggtaatagtcaaagttcactaaactaccgtgaactacttttaagataaaaccttataattttcatttcatagcaatgaaacaacataggtactttgataaattacatatattcaagtgaaagttggtactttacagtatttgtcattaggtttttacacataataaacattgtgatggatggcttgaggaatttaatatataagcttactctataatattctccaaatatgtacttaaaatataaaatagccctttaaaagcattttctttacttagcacttagaaatgaacagaatgatgatttgaagcaacaaattcaggatacttttgtgagagaataaactacagaaatagcaaatacaagatgaaggaagattgctcttacaaagcaagacagaggttctgcattgcatggttatttttaagctaatacaattagtaatgtaatagcagacatggttcaagaagaattagcagtttgggagattggcaagtgacctcttccttataaaagtgggaccttttatatgagcatttcagtctgtttggctatttagtgaggtaattagtgagggaatgagcagtttgaagagtattcagagttgagcgtctgatgtaattaaagatttggcaaacatggccgggcacggtggctcacacctgtaatcccagcactttgggaggccgaggcgggcagatcacctgaagtcaggagttcatgaccagcctgaccaacatggagaaaccccatctctactaaaaatacaaaagattagccgggcgtggtggcgcatgtctgtaatcccagctgctcgggaggttgaggtaagagaattgcttgaacccgagaggcagaggttgcagtaagccaagattgtgccattgcactccagcctgggcaacaagagcgaaactctgtctcaaaaaaaataaagatttggcaaacacaatcaatgagaagagaagaaatgaattatatttcgcttagaaaagtgaaaacagagagagtccatacggctcaatttcccgagataaagtataaaattgcttctcagtttttcctcatgcccagggcagtggaacctaccatacttgttctttttcccactcacccacttacctgaatggtaattgtggtcagcccttatgaacagtcatttgttttctctatggatttaaaaattatatacttaaatgaggaagtagaagaatgaactgtagagaccttttgagtcctagttataagctttttcataacaaaagacccttatggcattgaaattattgatgtgactttgttagggaaatcagaggcaaattatttgcctctgtcatttaaaccactgtgtatagcatttcctatagtgatgctgagtccaaattccataaactaaaatataggaatctaagatagtgatttaaaataaaagattttagccaggcatagtggctcacacctgtaatcctagcactaggtgggggatctcctgagctcaggggtttgagaccagcttggcaacatggtgaaaccccgtctctacaaaagatacaaaacaattatccaggtgtgatggtgtatgcttgtaatcccagctacttgcagggctgaggcaggaggattgcttgagcccaggaggtggaggttgtagtgagctgagatcacacaccactgcactccatcctgggtaacaaagtgagaccctgtcttaatcaataagatttctggtcaattaggggctctgttattcacagaaaaccagttcattgagtgatcaattttctgagtgttttgttcttcaaattattaaaattaatgatttatcacaagtatgttttaagtattggtaaggttgatagcagcttgactggttgacttgtcagagtgtagagtgctgtgggaagccaggtgtctgggtttcttggaccctcccattctcgtcttgcccttccccacgagtttgcttcttccttaactaattctccccctctccgccccttagtctcccttccattatgcccctcagtctctgtgtgttctatttttcttccagcagtgggtccccatgaacagggaagtaggacagagataaacggaatgtttcttaaagtgctatataagcatcagttggctccaaggaagggaagtacatggctgggagttaggatggaagaatttttatcatgtacccttttaattttaaaacattgaatggaattactgtcttgtccagtactgtcccatagaactttctgtgatgatggaaatctgtatctgcatagtccaacatagtagtcaccagccacatgtggttactgagtacttgaaatgtggctagcatgattgagaaactgaattttaattttaattgatctaaatttaaatagttacatatggttagtgattgctgttttgaatagctcagatctgaaaaaaaaggtgttttattaagaaaaaaattatgaataaaacattaaggctgttaggacaaaataaaaactcgtcgttaggctcagaaatatgcaaaacttactaaaactctacccaatccagtaagagtgcttacatctttaaaattgtcaaataggattttggtaatcactaaatttggcaaattcagaaaattgaccaataaaattggcaggctaatcctaaaaatgctgggtgcatttaaaaaaaatccctgagaaatgctgaagttatatatttataagaataagatcttttattcactgaagatattacaggaaaatatttcacaaaacaagtttttgggaaacagattggtgaattcagctagttaagacaaatagattcttcagcagtttggccttcactgagttagctgtgccacacattgaccattccttggaagttttcttggatgcatctttatcagctgcagcagccataggggagtccctggaggcatgggcagaaaatttgaatggcccttcgtgatgaaaggaaggcagtcacctgaaaaggtatgaggaagagtttgtttctctgatcaaaccttcagagtttccacagcagagcagaaatataacttctgattgcagccatccttaggaccctgcatcaacccgggagcaaattactgagttatttctttttccgtgcctgattttattaaacatttatttacttagagaaaaatcatcatattccttataagagtgaaataattatcaatattttgaatctatgtttagaaataaatattttaatttgtattttaaatcaacccctatagggcaggaatttatgtagcatcttctgcatctgcttatacaaatgggctttaattttatagattaccagttatgtaacttagatttcttaaaactgtatacagataactaatttttattttgaaatagcttttatgttcttgtgtttatgtaatagtcacattaattttgctcttttggctttgtgttgtgtttatttgatgactgttttattcggtttaattttttcttgattttgcaaattcatttttatcatctttaagtggtggagtggccatttcagcttgaaatatttcactgtctttataatttcattccatgcatgtgttttgtgtttgtgacggtgtggtggtatttagtctatagaagaacatgtggagcaggtcaaccaaaactgcatagcagaagattgccacatcaaggtagtattccaagatcttgtatttagctcattctttaaagttcaaggagctaacgcctcatctctgatactaaccatgacctgcccaactggctaactactcagagaactcatagtactcccataccacttcagtggcacaggggaggagatgcttcactgtatctggcttgctctgtcttgcccttggttcttctctttcttgctccctgtcccatcttcacttgtcactttttctgttttaagcatggctgtttcatcttcttgattctgccttttctttccttcccatcaccaaccctaagccattgcatcttcctctcatcagtctcttttattcctttcgaagtatccctctttacaacttttccttatttctgtctcaccacccttacttcaaagggtggtttctttgcggttttctatggctttttactccactctgtgcctcttaatgtatacacattcttattgcagaatatttatgcacttttggaagagctaagagagacatactactgtataaattactaataaaaatatattagccatgttttataattaatcagtatcttaccatcacagtggaaattggggtgattacaggacatcagagaatttaagcaaattttccaaagctagttttcaacacattaaagttactcttacccttttttcttgctgctgctgctgctgctgctgctacattttcttcttatcctacatttaaatcttatgggatgtgcataactctaaatagagctgtgctgcagcaactaaaactgctgatgaatgttttctaggttgaagctgatctgggctatccaggtggaaaggcgaaagtcatccataaggaatctgatatgatcatggcattttctgttaataaggtaaaagctctcatcattatacacagtgtatttctccttagtgaaattgcttaaatcatcgattctgcctttgctttataggcaaattgtaatgaaattgttttggcttcaacacatgatgttcaagaacttgatgttacttctctactggcctgtcagtcatacatatggatcggagaagaatatgacagagaatccaaaaggtttgtctcatagtcacttttacatatagttttctgtaagaagtacccaccaaatggttatgcacatgatttgaattatttcaaaaggtatacgtgtatctccttcatttgggtaggtgacaaatataattggtttagctgccagtgaaagtctttgtctacattaactgaatgaattacacttccattaaaccctacactattgataatatttcaataaggataatccctaacacttggcttcatgatattcagtaaattaatctgatctggataattaaaacagtagacacaaatatgttaattacactgagtcacatttaccgagtaattttgcagtgtttcttcttatcacctgataagcataccttttcttaaacataaaaatgtagacggctttacttttcattgaagctatggacactgcaccaagagtgttttgccattcttacctattttgaggtttcttctttgtggtttgccttccctcctgcttttctccagactcttagaaattgttcatgcttgaggatggtgccatgatagtttctctcctcattttgttgaattcttttttttgttagtatgtgatataactaggatttaatatcacatttcagagtagatataaccatgtactatgatacaatccatcccaacaattactttcacattttatatgtcttactccaagaaatctttaaactcaaatttctttaaacgtgttaatttgatactgagctatctgtacttgaagagaacataatatttttccatagataacaacaaacttttgtttcaacttgtgcagcaataaagttgtccccaaacaacattagactaaatttacattttgccaaaagggaaaaaagttaaccagtattaacattggcgattaggacttgtacctaagtttttctcatggctacttagtttttaaaataaagattgtcctatgggtacataagaagatttttagttggaatttgtgttaagagaaaagggaatgttcacagtaacacatgaatgtttttcacagttcagatgatgttgattatcgtggttccactacaactctttatcaacccagtgcaacatcctattcagcaagtcaggtgcatccaccttcatctctgccatggctgggcactggacagactagcactggagctagtgtggtatgttatttacttataggtatcatttctggatttggactctgaaaaatcagttggaatctctttgacataggaatgatcctaaatttcagggacaaacaccagtagataggccatgataatgacagctgacatttattgtggcttttttatttggtgacagggtctggctctgtcgcgcaggctggagtgcagtggtgcaatttcggctcactgcagccttgacctcctgggctcaattgatccttccatctcaacctcccaagtagctgggactacaggtgcatgccagcgtgcctggctaatttttgtattttttgtagggatggggtttcaccacgctgcccaggctgttctcgaactcctgggctcaagtgatctacccgcttcagcctcccaaggtgctaggattacaggcatgagccaccacactggcctcatatgactttcttagtgtcagatacatgctttttctcacaacaatcctaggtggtaggtgctattattaccctccattatcattttacagatgaataaacagatacaaaatggtaaagcaaagttaaaggggaattcatgtctacttctaagtgcttgaaagcatgtcagtaacattcttgtcactgtagctggaggggtcccattcttatgttctgctctgaagcatctggaggtgctcctgaatatcctcagggaggggcacttgaagaagagttcctttattatgagatgaagctccttggtaacctcacaggccagggctataccagcaagtgactgtgcttcctcaccctcttcagacaagtgttctatgtagtggttcagaacatccataacaggctttatctcagtaataagcaaggtgtaagagaataaatgtcagaatttatcctgaagcatatccttcctcatcttttctgcatacacaaaataaaatttttaaaattttcttttaaagcttatgaaaaggaatctacataatgttaagagaatgacttcacacccagtccatcaatactgtaagtatttatgacctaataattgtaagtgtcctcatttggaggttgatttatagaatagaaaatattggaactctttaatttcttatttcctgctttttctcttgtgtttcagatcttacaggtgctcaggacggcagtgtacgaatgtttgaatggacgcggcctcagcaacttgtctgctttcgtcaagctggcaatgcaagagttactagattatattttaattcacaaggcaacaaggttagtttctgggggctactgctgaattcatctgaaaatagttgtggatatttaggagtaagtgataaaagtgcatcgaaaaatgaattcagtgaccctggatttaaactgagtagacagtttgttggagtctattcatacactctcttttcttccaatagaagcaaaaatctacaaaatttagtatggattaatcatctatttaaagatactaaatatactgtgagagtaaaaaaactgcctgtgttgagtgtgttggtgattcctgtaagcacagtaaagttcttgagagaaacctagtttcttactaaatttcatcagtaagaggttagaggaaaacagtgaaacaggtaagcagttaagaagtaatggaagggccagtcacagtggttcacacctgtaattacaacactttaggagcccaaggcaggaggattgcttgaactccagcatttgagacaacctgaacaacaaagggagaccacatccctacaaaaatttttttaaaaagcccaggcatgtgcctctagtcctagctactcagaaggttgaggctggaggatcccttgaacccaggagtttgaggttatagtaagttataattgcactactgcactccagcctgggtaacagaatgagaccctgtctctaaaaaaatttaaaaaaaaagtgacagggaattttttagcacttggactttttgggaatgacagcaacagaaacatagttagaggcagaatgtttatttagtagggccttagtgaatcttccttccatgtttttacctttgctgtggatgctaagaacatgtgtttagtagttatactgttcttacagtgtggtgttgcggatggagagggttttctgagtatctggcaagttaaccaaactgcatcaaatcctaaaccttatatggtaagtatcactaaatgttcccagggcgcatatacacaacactttgttcatgaagtgtctgtttcagacagtgaatctcattggtggtcctattgggaaaaggatgatttttttcagcaatcccagcctgacagcagcacccatccttaccctagttttagactgaaatgacctgaaaaacaaaaagccttgcttttcaccttgaagtacagtttatattttaaaaattttgggggctttccctgtgtgtggtacaacttgggttttttttcattattattatactttcatccattttgaaaactctatcttcttaatatacacatgataaaattctgtcattaagaatcaggttctgccgggcacggtggctcacgcctgtaatcccagcactttgggaggccgaggcgggcagatcacaaggtcaggagttcgagaccagcctgaccaacctggtgaaaccccctctctactaaaaatacaaaaattagccaggcatggtgacacgtgcatgaagtcccagctactcgggaggctgaggcaggagaatcgcttgaacccaggaggcggaggttgcagtgagctgagattgtgccactgcgctctagcttgggcaacagagtgagacttcgtctcagaaaaaaaaagaatcaggttccaaacatctgttccaatttgttccagaattgtgcttaccagattataaaataaccaatcccaatgagccaccttaatccaaattggattacaaaatagttggtgatgaagataagtagatctttacctgatggagatatggtgggggaaaggaacatgggggagggtggaaggtgatgctgtcctgtgtgaaacttcaggcttcacatatatggagggaggttcagaacgccttgaacctcctgggaccagatagattacccaaatactttttaaaatttttctaaactatacatatgttcttaattatgtgtataagataattctcttaaattaggacactatagactgtaccttgtctatgcagaaatggaagtaatcttgaatttatacttttgtcttcagtcagatctgtaccactataattccagacagaaaaacatgcattatattttaaaataccttgacatcctaagactagttgggtctgtaagcatttcctttgtgactgttaaagtttattacatgtatttgagatcattagcactaaaattgacgggtcttaggtaggttcatgtactttgatgtcctattcttacataatctgaaaaacatgacctttaattctgtttttaccaactccagttattaaaaattattggacagtagccaaataatatacacatgacagttaagcctcatactatcacttattcttttatcctagaccgagtttttaaaaactatttttagctcatgcatatagtatgttattagcagacatgtatgttggtactgtatcaaattttatccaatggtaaaataacatcagttgcactttgtttttcgtagagttggcagtgccacagtaaagccacaagtgactttgcatttattacctcttcaagtctagttgccacatctggacactccaatgacaataggtaggttgacagaaaagcaaagtaagaaatataaaaacgttagaaatccatacctttagcaagaatacttttctattagtagggtttttccactctaggcattaaaaaaaaaaactttgttacataattcttatttcagagtgttttttcttaccaaaaagagaaaagcaaaaatgaaagttattcctaatatatgtaatttttattttaaagctattcagtcttttttaaactactactgttaacactgttagtttctctaggactaacaggcatctgatattgtctccatcattctcaacatttttattttattgcagtaggtttgggggaataggtagtgtttggttacatggataagttctttagtggtgattgctgagattttggtgcacccatcacctgagcagtgtacactgtacccagtgtgtagtcttttattcttcaccctcctcccacccctcccaagcccccagagtccattatatatcattctgatcctttgcatcctcatagcttagctcccacttacaagtgagaacatacgacatatgattttctactcctgagttacttcacttagaataatggcctctaactccatctgggttgctgcaaaatgtgattatctcattcctttttatgaagtattccatggtgtatatgtaccacattttctttatccatttgttggttgatggacatttaggttggttccatagttttgcaattgtgaattgtgctgctctaaacaggcatgtgcaagtgtctttttcatataatgacttcttttcctctgggtagatacccagtagtgggattgctggattgaatggtagttctgcttatagttctttaaggaatctccgtatactgtttttcatggtggttttactagtttacattcccaccagcagtgaggtgtccccttttcaccacctccatgccagcgtctattgttttttggttttttaattatggccattcttgcaggaataaggtggtatcgtattggagttttaatttgcattttcctggtaattagtggttttgagcattttttcctgtttgttggccatttgtattttgagaattatctgttcatgtcctttgctcgcttttgatgggattgttttttcttgttaagttccttgtagattctagatataagtcccttgtcagatatatacattgtattttctcccactctgcaggttgcctttttactcttgctgtgcagaagtgttttagtttaattaggtcccatttatttatttttgttgcatttgcctttgggttcttggtcatgaattctttaagtcaatgtctagagtagttttttttgatgttatcttctagaatttttatggtttcaagtgttagatttaagtttgacccatcttgagttaatttttgtataaggtgagagatgaggattcagggactaacaggtatttgacactgtccccatcattctcaacatttattttgacctcacatggttttcattagcaacacatgcccatgaataacatcttgtttccctgcagtggctaccacctggggatataaaagcattccttatactcaggaagtcatatcagtttcctggagtggcaatggaaaggagatggggtagaggatgcagagacgggcaggaccatgtgagatggaactgtgtagtttgaccctacccccatcctagttgggaatcactactctctataggtgtgagtgaacaaaaaagataagaatgaataagcaaaatatttgactgaaagacaggttgtccctgatgacgacttataacaatcatttatgatgtatttttgttattgtgtttctttaaaagaaatgtttgcctctgggacacattaatatcacccggaaacagcctcattcatggtgagttaaggtctatgatttttaaaaatataccatgaaggaataatacaccatgaaggaatgctttcttggttttaattagtgaatccagtgagtgtttattgacaggttgaaaatggagaaatatttagaatgaatgactaaaaatttggaaagttaattagcatatctggcttccttgctgagttaaagatatatggtctcagaaatccaaaatagtctttatattctattcagaaaatatggtatggatagtggtactactaacaaggctatttaagaaattagttgcaaagtattcattgagcttaatagaaaataacatattttaaagaattaaacctcatcataaaatactttttgtctttttttcctttttgtggagatcaaggtcatgctgtattgctcaggcaggtctcaagctcctagggtcaagctatcctcccacctctacctccctaagtactgggattacaagcatgagccaccacacctggccctaaccataaaataaaacaaaggttaaccttattataatgactagaaatgtaaacagtgccatttaaatattattccttttaagacaatacttgccaaattagtgtcctaactctgtcttccacatagtaccacccaaaaagtgctccatgctcaagtaagtttggttaaatgaagtagattgtcagaaagacagaaagattctcagtcttttaatacactgatatgcattttgaaatatgtagttaattctcaattttattgcagaattctgcaaacagtggttaacattgcttacagattttctgcatgttaatttgaatctttaatcatattaaaatgcaaatactcctgggaaggataatgaacttcttaacttgtaactgaaaacattcacacattttctcatagtgtcgttgtttcaattacttacctgaaaagaactttttgtacggtacagcacttggctgggttaatactcaccaactttgagaaggttggtctctgctcttctgtatactttttatgaggcagtatcacttagggcttaaggtttaaactttctttttctctctgtgttcatttcatattgagattatggataaaaagtttgttctgacattgcttaacatttttctttaatcatgtgattacagaaattcaatgacttacaaaacaataaatgtaccttagaatgaaaaatgcatcagtaaggtctgtatttaaatgtggatgtagacatcataattaccaagacaagaaattgttttgagaaattctctgatgtttttcttcttcaggtttcacgtgccacgatcatggtgccacggtactgcagtatgcacccaaacagcaactcctaatctcggggggtaggaaaggacacgtctgcatttttgacatcaggcaaaggcagctcattcacacgttccaggcccatgactcagctattaaggctctggccttggatccctatgaggaatattttaccacaggttcagcagaaggtaacataaaggtgagtcagtacaagaggttggaatgtgctaaagactgattggaaagagaaaaaacaaaaactccacattctttgaaataaagcttcactttatttcacttgggctactgcatggagatactgcatatctcaacactctgccgcctccccatgctcctgtatggttctttctaaactgttatggtcaatgagattatcaaactcattggactcaggccattagaaagctttaaagcattctattttgagtaaagtgtatgagtttaatgcatgaaattttttgatgacattagtttggctccttagaagcttctcccctctccctcagtactcttgtgtgtggtggaggtgacgtttccagtaagtgagctagtgcagatgctccttgactttatggtgggattatgtcccaacaaacccattataagttaaaaatattgttaaagttgaaaaacatactttcaacttaatattttcaacttactatgagtttattgagactaacctcaggataagccaaggagcgtgctgaatgcgtattgctttcacactgtcataaagtcaaaaagtcttgtcaaaccatcgtaagtaggggactgtctgtaccacactacttttacatagccttaggacctagctcagcatgaggaacacatttaactgaattaactcaaatagttaattgaattagagatgggctacatatggttaatatgaagccacaagaggatgtgaaggaaaatatggaaggaggacagtaaatgaatcgtgggagtggtgttatcatttcccacttagataagctcttaggaaagaggcagtgggtgggaaggttgggctttagtgagatcacttgggccaagggagcagaagggccatgtttttgcttttggtcttttcgtaatatatttttaactccttttgttttgcactaggtttggagattgacaggccatggcctaattcattcatttaaaagtgaacatgctaagcagtccatatttcgaaacattggggctggagtcatgcagattgacatcatccagggcaatcggctcttctcctgtggtgcagatggcacgctgaaaaccagggttttgcccaatgcttttaacatccctaacagaattcttgacattctataaagattggggttttatttttatatacatttcagttaaaaggcacactacagtcatcactaggcaattctgctttctaagcagttgtattgaaaacagagaatctctgtgtagaatttgaatatgacccaagctgagtattatctaaacaggttggtggaatgaatgcgcatgtaccttattatgctgacatactaaaaaaaataaaacctagtattgtatgaaggatagctattctttacagcatttagcaaacctgattcagaaaacatttgagattagcaaattagtaacttgaaataatgaaaaggacgtttataccaaattaaggaagaaaatgttgctgatttgggtttttcttcctgttcttaccactgactgaagcatgcctgcagtctcctcctctgttgaatgaaggataatcataaggtgtttgttaggagcgctagaccacctggaaaactttcttagctgtggagcagtgcgcagtgaccagttctctgctgtgagaggccgtttccattctttcctgctgaatatttttcctgttagtgtttatactgagctagtactgtaacttgcaaatgagtgcaaatttaaatgcaatgttttactcacaatttgcacattcacattttttggactgctagtttttctatttaaatatttgccttcatgttaggaatgtactatgtgaacatgacatatttgtagttaaccaaacacaccttcttagtccagtttagtactttttcttttcgtgtattcaaggttaaacacccaaacatttaaggatatgttgaaactacaccaatagagcatttcatatcataattaaaatgaatgttaggcttcttgtggccagttaatagttgatgagattggtgacattatttattgccacagcctattgtataaactatgcagagttaaatatttgcttgtaaaatattagccaatgttgtcattattttgatgtatttccttggttatgaccaaaaatatgttgagatactgaaactaatgtctgtgtgtttaaatgtttaccagcaaattgtcttatcatgttaatgagaatgttcaatgcctgtgtggtaaatagtaaatacaatggcataaaagtaactttctctgaagatgtgatgttcaggctgtgaaatatatatgtaaaagaaaaataaatgttatttgttagagtttttagtttgatactgtttttgaccattgagatttttaatttgataaaa

SEQ ID NO: 3 - DNA, 11173 bp, Homo sapiens
  misc_feature (1)..(11173): Homo sapiens Dmx-like 1 (DMXL1), mRNA MN_005509.4
tccggggctcgggatgagtcgcgggccccagctgagcggctccggctccaggcgcctgtcgctgcttctgccgtcgccaccgaagagcggccgccgcccctgagggaaggagggagggaagcagccgctgacccgtggcatgagctggatgcggtgtccgttgcaggactagggcgccgacatgaacctgcaccaggtgctgaccggggctgtgaaccctggcgaccactgcttctccgtgggcagcattggcgaccagcgcttcacggcttatgcatctggatgtgacattgtaatactgggaagcgattttgaaagattacagataatcccaggagctaaacatggaaatattcaagtgggatgtgtagactgttcaatgcaacaaggcaagattgcagcgtcttatggaaatgttatctccatttttgaaccagttaacctaccaaaacaaaagaaaaatttggaattatatagtcagtggcagaaaagtggccaattttttctggaatcaatagcacacaatataacctgggatcccacaggcagtcgtcttttaactggttccagctatttgcaactctggtccaatactaacttggagaagccaactgaagatgaaaatttaaataaaacagatcttaactttggagattggaaatgcatttggcattgcaaaactgcttcccaagttcatttaatgaaattttcaccagatggagaattttttgccactgctgggaaggatgactgtcttttgaaggtttggtataatgtagaaaactggcggacagctgttacttctccagatggaagttcagaaaaacaatcccaaggagaaattgacttttcttttgtgtatctggcccatcctcgagcagtaaatggattttcctggcgtaaaacaagcaaatatatgcctagggcttctgtatgtaatgtactgttgacttgctgcaaagataatgtgtgtcgtctttgggtagagacatttttaccaaatgattgtttgctatacggaggtgactgcagccattggactgaatcaattaatttaacaaataacttcaagagaaatgcttccagtaaagaacgagttcaaaatgctttagaagtaaatctgagacattttcgtagaggtcggaggagatcacttgctcttgtagcacatacgggatatctaccacatcagcaggatcctcatcatgttcacaggaacactccactgcatgccaatgcactttgccactttcatattgcagccagcatcaacccagccacagacattccacttcttccatctattacatctctgagtctaaatgaaaatgaagagaagaccggaccttttgttgtacactggctaaacaataaagaactgcattttactttgtccatggaagtttttttacagcaacttagaaaaagttttgaacaaccatcttctgaggccagtgtagaagattctaatcaggcagatgtaaaatctgatgaagaaactgatgatggtgttgatgatctgaaaataaatcccgaaaagaaggaattaggctgtgataaaatggtaccaaactcaagttttacatcattatcgtcagctgccattgatcatcagattgaagtacttctgtctgaatggagtaaaaatgcagatatgctatttagtattcatcccatggatggttctttgctagtttggcatgtggattggctggatgaataccagcctggtatgtttcgtcaagtacaggtgtcctttgtttccagaattccagtagctttccccacaggtgatgcaaactctctctgtaaaagcataatgatgtatgcctgtaccaagaatgttgacttggctattcagcaggggaaacaaaaaccttctggcctcacccgttccacatcaatgcttatttcttctggtcacaataaatcatctaatagtttaaaattaagtatttttacgcctaatgttatgatgatatcaaaacatgctgatggttctctgaatcagtggctggtcagttttgccgaggaatctgctttttctactgttctcagtatttcccacaaatccagatattgtggtcatcgttttcatcttaatgatttagcttgccactcagtattaccattattgctgacaacatcacaccataatgcattaaggacaccagatgttgataacccagagcaaccttttgatgctctaaatattgaagaatgctctttgacacaacaaaataaaagcactgttgacgtggcatttcaggatcccagtgcagtttacagtgagcttattctgtggagggttgacccagttgggccattgtctttttctggaggagtttctgagcttgcccggattaattctcttcatgtttctgccttttccaatgtggcatggctgcccactcttatacccagttattgtctgggtgcatactgcaactctcctagtgcatgctttgtagccagtgatggacaatatctgagattatatgaagcagttattgatgctaagaaacttttatctgagctttctaaccctgaaatttctaaatatgttggtgaagtctttaacatcgtcagtcaacaatcaacagccaggccaggatgcattattgcattagatcccattaccaaacttcatggcagaaaaacccaactgcttcatgtttttgaagaagacttcattttgaataaccttgagaagaaaagccttggcaaagacagcattttatctaatgcaggcagctcacctaatggattttctgagaagttctacctaattgtaatagaatgcactcaagacaaccgttcactgttacacatgtggaatttacatctaaagtcaattcctgtctcattagatgaaaaagtagatacaaaattatccgaagcggtttggcagccagaagaacattattcttcttctccagagaagatcctatctcctttttcacaaaagtatcaggcttgcagagcaaatctccagagtaccagcaggttgactctgttttcagaaatggtttatagccaagaattgcatttaccagaaggagttgagataataagtattaagccatcagcaggacatctgagttcatcttctatatatcctgcatgcagtgctccttatttattggcaacttcatgttcagatgagaaagtaagattctggagatgcagagtaacagatggagaatctgccacgtcaaagaatggaaaaattgatcttgcatacatttgggaagaatggccattacttattgaagatggacttcagagcaatagtagtataactgtacctggtaggcctgtagaagttagctgtgcacatacaaatcgtttagcagtagcttataagcagcctgcatctaatagtagatcttcccaggactttgtgatgcatgtaagtatttttgaatgtgagtcaacaggaggttcatgttgggtccttgagcagacaattcatttagatgagttaagcacagtattggattctggcattagtgttgatagcaatttagtggcctataataaacaagacatgtatttatctagtaaagagaatatcacatcaaacacaaagcatttagttcacttagattggatgtctagagaagacggttctcatatcctgactgtaggaattggatcaaaactttttatgtatggacccctggctggcaaggtacaagaccaaactggtaaggaaaccctggcatttcctctctgggagagtaccaaagttgtgcccctttctaaatttgtactattacgaagtgtggacctagtttcttctgtagatggctccccaccttttcctgtttctttatcgtgggtccgggatggcatccttgtggtaggaatggactgtgaaatgcatgtgtattgccaatggcaaccatcttctaaacaagaacctgttataacagattcgtacagtgggagcactccatctataacaagtttaataaaacagagtaactccagttctgggttacatcctccaaagaaaactctgactcgatccatgaccagtcttgcacagaaaatctgtggaaagaaaactgcattcgatccttcagtggatatggaagattcaggtctttttgaagcagctcatgtactttccccgactctacctcagtatcatcccttgcagcttttggaactcatggatcttggtaaagttcggagagccaaggccatcttgtcccatcttgttaagtgcattgctggggaagttgtggctctgaatgaagctgaatctaatcatgaacgccgccttaggtctctcacaatcagtgctagtggaagcactaccagagacccccaggcattcaacaaggctgaaaatacagattacacagaaatagattctgttcctccacttcctttatatgccttacttgcagcagatgatgatagctgttactcatctttggagaaatctagtaatgagagtacgttaagtaaatcaaaccaattatctaaagaaagttatgatgagctttttcagactcaacttctaatgactgatactcatatgttagagacagatgaagaaaatacaaagcctagagttattgacctttcacagtacagtccgacttactttggacctgagcatgctcaggttctttctggccacttacttcattctagtttaccaggactcagccggatggagcagatgtctttgatggccttagcagatacaattgcaactacaagcactgatattggagaaagccgagacagaagccaaggtggagaaactcttgatgaatgtgggttaaaatttcttttggctgttcgactccatacctttcttacaacttcccttccagcctatcgagctcaactccttcaccaaggcctgtctacaagtcattttgcttgggcatttcactcagtagcagaagaagaactgctgaacatgttgccagccatgcagaaagatgatcccacttggtctgaactaagagctatgggtgtggggtggtgggtccggaatacccgcatcttacgcaaatgcatagaaaaagtagctaaagcagccttttatagaaagaatgatcctttagatgctgccattttttaccttgcaatgaaaaagaaagctgtgatttggggattatatagagctgaaaaaaacaccaggatgacacagttttttggacacaattttgaggatgagaggtggcgtaaagcagctttaaagaatgctttttctttgctaggcaaacaaagatttgaacattctgcagcattttttcttttagctggttgcctcagagatgcaattgaggtatgtcttgagaaattgaatgacattcagttggctcttgtaatagcaagactctatgagtctgaatttgatacatctgcagcatataaatctattttacgtaaaaaagttttgggaatcgattctcctgtcagtgaactgtgttcattgaacataaatatgcatcatgatccttttcttcggagcatggcatattggattttggaagattatagtggtgctctggaaacattaataaagcaacctatcagagagaatgatgatcaagttttatcagccagtaatcctacagtttttaatttctacaattatctaagaacacatcctcttttgctgagacgtcattttggatcatctgatacattttccacacatatgagcctaacaggaaaaagtggactggcaggaacaattaatttaagtgaaagacgtttattttttaccactgccagtgctcatttaaaagctggctgcccaatgttggctttggaagtattatcaaagatgcctaaagtcatcaagaaaacaagacctttttatagggcttctagttttctggatactagtaaagactgttctccttcttctccattaaagttggatgcaagggaagataagtcttctgctgttgattggtcacagtcactgataaatggttttggatcttcttcagagggttcctcagagaagcaatcaaactccactctttcttttgactggagccaaccaagtgttgtgtttcaggatgactctttagagttaaaatgggacagtgataatgatgaagaaaatgaggatgtccctatttcaatgaaagaactaaaacctttacagagaaaaacagataaaaagttggatgacataagttctaactacacagaatctttcagcacactagatgaaaatgaccttttaaatccatcagaagatataattgcagttcagttaaaatttagagcatgtttaaagattctcacagtagaacttcgtactttatctactggctatgaaatagatggtggaaaattgcgttaccaactataccactggcttgaaaaagaggtgatagctcttcagaggacttgtgacttttgctcagatgctgaagaactacagtctgcatttggcagaaatgaagatgaatttggattaaatgaggatgctgaagatttgcctcaccaaacaaaagtgaaacaactgagagaaaattttcaggaaaaaagacagtggctcttgaagtatcagtcacttttgagaatgtttcttagttactgcatacttcatggatcccatggtgggggtcttgcatctgtaagaatggaattgattttgcttttgcaagaatctcagcaggaaacatcagaaccactattttctagccctctgtcagagcaaacctcagtgcctctcctctttgcttgtacagccaatgccaaaacagtagttgccaatccattattgcaccttagtaatctgacacatgatattctccatgccataataaactttgattcaccaccccaccctgatatccaaagcaataaagtgtatgtaatgcatactttagcagcttcactttctgcttgtatttatcagtgcctttgtggtagtcataactacagttcatttcagacgaatcagtttactggaatggtatatcagacagtactgcttcctcatcgaccttctttgaaaacaggaagcttagatgaagcattaactcccaatacgtcaccagctcaatggccaggaataacttgtctaattcgacttttgaattcttctggcgaggaagcccagtcagggcttacagtcttgctctgtgagattctcacagcagtgtatcttagtctcttcatccatggcctggccacacattcaagtaatgagctatttcggattgtggcccatcctctaaatgagaaaatgtggtctgctgtgtttggtggaggtgcacatgttcctagcaaagaacagacacattcaaaaactttacctgtttcttcactagttgaagaaggagaaaaacagaacaaacgttttaggccgtcaaaaatgtcttgcagagaatctgccccactgaccccttcctcggcaccagtaagccaggagtcactggcggttaaagaaaagttcatcccacctgagctcagtatctgggactatttcatagctaagccttttctaccctcttctcaaagtagagccgaatatgattcagaggagagtctgggaagtgatgatgatgacaatgatgatgatgatgatgttttagcatcagatttccatctccaggaacattctaattcaaattcatatagttggtccttgatgcggttggcgatggtgcaattggtgctcaacaatttgaagactttttatcccttcgcaggtcatgatcttgcagagcttccagttagttcacctctttgtcatgcggttctaaaaactcttcaatgttgggaacaagttcttctccgacgacttgaaatccatggtgggccacctcaaaattatatcgcaagtcataccgccgaagagagtttgtctgcaggtcctgcaattcttcgccacaaagctttactggaacctacaaacactcctttcaaatccaaacaccatctggcactgtctgtgaagaggctttggcagtatttggtgaagcaggaagaaattcaggaaacctttatcaaaaatatattcacaaagaaacggtgtctaaatgagatagaagcagatttgggatatcctggaggtaaagcaagaattattcataaggaatctgatatcattactgcgtttgctgttaataaggcaaatagaaactgcatagcaatcgcttccagtcatgatgttcaagaactggatgtttctggaattctggccacacaggtctacacttgggtagatgatgatatagaagtggaaaccaaaggatcagaagatttcttggttatacatgctcgtgatgatttaacagctgttcaaggtacaactccatatacacatagcaatcctggcactccaatcaacatgccatggcttggtagtacacagactggcagaggagcatctgtgatgattaagaaagccattaataatgttagaagaatgacttctcatccaactcttccttactatctgacaggagctcaagatggaagtgtcagaatgtttgaatggggccattctcaacaaataacctgttttcgatctggtggcaattcaagagttacaagaatgagatttaactatcagggaaataagtttggaatagttgatgctgatggatatttaagtttgtatcaaacaaactggaaatgttgtccagttactggaagcatgcctaagccatacctgacttggcagtgtcataacaaaacagccaatgattttgtcttcgttagttcctcctctctgatagctacagctggtctttcaactgacaatagaaacgtatgtttgtgggatactcttgtagcacctgccaatagtttagtccatgcatttacctgccatgacagtggagccacagttttagcatatgctccaaaacatcagctactaatatcaggtggcagaaaaggttttacatatgtatttgacctttgtcaacgacaacagaggcagcttttccagagccatgattctcctgttaaagccgttgctgttgatccaactgaagagtactttgttacaggatctgccgaaggcaatataaagatttggagtctctctacctttggtcttctccatacttttgtcagtgaacatgctcggcagtccatttttagaaatattggaactggagtgatgcaaattgagacagggcctgcaaatcacattttctcctgtggagctgatggaacaatgaaaatgagaatactgccagatcagtttagccctttaaatgaagtgttgaaaaatgatgtgaaatttatgctataacatttttacaataagatgtacaatttattacctatatggaagtggccaacagatataatatacagtgatcattctctatgccacaaattagctaatgctttcttgtttttatatttattttatggagctttgcccttgatgcactgatgccttaaaaattaacaaggtcattcagaagtagattacattgcctaaagtagaatgtgtaagtaatgctgtaataatacatatcatagtatattataatcagtatgtcatagtgttaaaggtgttttgttttcttattgatacttttccacaggcatctctgcatgaatttcttccacagtaaaaatacgttttttgtaaaggcaattgtacataatactcatcacttaattcaccacactctcacttcctttattagccttatacatctcaaactcttctcttaattaatgataggtatttgagtaagaatgaaaaaaataatgaacatcttcattaaaattgtcattgagacgtcagtgataaatgagctagatggctcaatatgtaaggttttcagtagtttaccctccggaacccaagttgtatgtatgtatacgtgtgtgtgtgtgtgtgtgtgtgtatcttacacatcttatttgaacttagttgtatatattagcgaaaactggtttttcatgtgtttttgtgccataacaactattgccaccagaataactttttttttgcaactgtgcttttcatttttaaaaaatttttgaattcccatcctaattttcaaataagtttcaaggagactatcaggattattattttaaagattagatttagtcaaataagtcttagcaggcaataaagtttctgtggtggcatatatcatgtaagacacttaaagtaagtttgtgaatttgtcaactttcgagcatcaaacaaatattttacttaaattttattttatcttatttttaggtgcttttaatctcaaaattctgaaaagcgaatagcagtgttttcagaaacaaatgtgaaagcagtcaaattaagtagatactatttagaaatgtaaaatactctccagatctaccattaatagaaaataaactaaaccttatattttatttttgccaaaatattttattataaaatatgaccaaaatatttaaaatgcacaatgcttttaacttaaatgtgctaaccctgtttctgtctgttttgtgctgtaccttttctgattcagaattatagaaaacttgataaatacttgattttaaccaatgagactacaggcagatgggactaagtgtttatgggacaattatgtactatttaacttaaatatattttgtttaataggaaatatataataatagcattttatgtaataaaatatgggcaacgattatcttggaaattaaagagtcaaagcaaagaaatgaagggctggtaaaatgaattttgtaatatcctcaggatacttttatcttaaaagtatgttgttaaagattttgtaaattgtatttcaacaattttaaatgtgttgagcaagttgcagtgcaaacactgtcattatgtagagagtttatatgcacataataacctgtacctataaatcgtgcaataaccatatgcgactattttgccatggagaaatctgacagcattgcaaacaatagtattgtttgatgtagttaaccttaagttatttttcagtaatttcttcacaaatcaagattcaaacagctttaaacacttccaatgagataaaatatttactattatgcttattagaacaaaaggtgtttaaggatgaactaaatattttaattgagcatttatatggataatcatacattatgtaagcccatatgtatttacatccagagtcataatattttaaataaacaatcatgcagaaacttt

SEQ ID NO: 4 - DNA, 10580 bp, Homo sapiens
  misc_feature (1)..(10580): Homo sapiens Dmx-like 2 (DMXL2), mRNA NM_015263.2
tttccgcagctgagcggcgacccgggcggcggcggcggtcgaggagctcccatggcagggacgaggcggagggaaggcgaaaggggggcgaggagttaagccagagcctccgcggggcgggtttccgagggaggcacagagggaaacggctctcgcagcccgaggagggtcaggcgcggagcttgtcgcacctcccgcgcattctgtccagcccgggctccggagatgcatctgcatcaggtcctcaccggagctgtcaaccctggagacaactgctactccgtgggcagcgtcggggatgtccccttcacggcatatggatcaggctgtgatattgttattttggcaaatgactttgaatgtgtacagatcattcctggtgctaagcatggaaacatccaagtcagctgtgtggagtgttctaaccaacaaggaagaattgcagcttcatatggtaatgctgtttgtatatttgagcccttgggcataaattctcataaaagaaattgtcaactcaagtgccagtggcttaaaactgggcagttttttttgagttctgtgacatacaacttagcatgggatcctcaagataatagattgttgacagcaactgattctattcagttgtgggctcctccaggagatgatattctggaagaggaggaagaaattgataatacagttcctcctgttttaaatgattggaagtgtgtctggcagtgcaaaacctcagtatctgtacatttgatggaatggtctcctgatggtgaatattttgctactgctggaaaggatgattgtcttttgaaagtgtggtatcctatgactggttggaagtcttcaattatacctcaggatcatcatgaagtaaaaaggagacagtcctctactcaattttcttttgtttacttggcacatccccgagctgtgacaggtttttcgtggcgcaaaactagcaagtatatgcccaggggttctgtctgtaatgtgttgttaacttcatgtcatgatggtgtgtgccggctctgggcagaaactttattaccagaagactgtcttttgggtgagcagatttgtgagactaccacttccagcattgccagcagcctttctcatgctggaagacacaaagacagaatacagcatgctcttgagacaatacaccatttgaaaaatttaaggaaaggacagaggaggtcatctgttcttgtaactcatgctgaattaatgcccgaccagacagcaatgcatgaagttcaaagacacatttcccaccatgcaaatgcactctgtcattttcatattgcagcaagcatcaaccctgccacagatattccaaatgtcttggttggcactgcatttaatgttgatgatggaaatgggggctttgtagttcattggttaaacaacaaggaatttcattttacatcatctacagaagtatttatgcatcaattacgaaaactttctgataagcaggtagatcatgaaaatgatgatgcagatagagaagatgaggaacattcacaggaggatagagaacggggtttacatatgaaattagaccatgatttatccctggatagagaatctgaggcaggtacaggatcatcagaacatgaagatggagaaagagaaggaagtcctagaacttactcacgacttagtgtaccaatgccactgcctacggttctgcttgatcggaagattgaaacgctgctaactgaatggaataagaatcctgatatgctttttacaatacaccctgtagatggtacctttctagtgtggcatgtgaagtatttggatgaatataatcctggaatatttagacaagttcaggtttctttttcttctcggattcctgttgcatttccctctggtgatgcaagctctcttagtaaaaatatcatgatgtatgcctgtataaatgcgacaaaagattctcaccacacgctgttacaccaggaggggatgtctgtaggcagtcctcacggatcacagccacactctagatcccacagtacacatatgaacatcttagctcccacagtaatgatgatctctaaacacatagatggttctttaaatcagtgggcagtcacttttgctgataagtctgcctttaccactgttctaactgtatctcacaaatttagatattgcggtcatcgatttcacctcaatgacctggcatgtcattcagttttaccactgttattgacatcctctcatcataatgctctattgactcctgaattagattgtcagtgggactcagacaataaattaagtagattaatggaccctgtaaaacatataaaaggttcctcgaaacaacctcttagaaatgcagcaactcgtacatttcatgacccaaatgcaatctacagtgaacttattctgtggcgtgtagacccaataggacctttgtcatacactggaggagtatcagaattggctcgaattaactctttacatacctcagcgttctctaatgtggcttggcttccaactctcattcccagttactgtctaggcacatactgcaattctgcaagtgcttgctttgttgcttctgatggcaaaaatctgagactctatcaagctgtagtggatgcaaggaaattattagatgaattgtcagacccagaatcttcaaaacttattggagaagtgtttaatattgtgagccaacagtctactgctcgacctggctgcattattgaactcgacgcaataaccaaccaatgtggctcaaatacacagttgcttcatgtgtttcaagaagacttcattataggatataaaccacataaggaagatatggagaaaaaggaaacagaaatattttttcagccatcacaaggataccgcccaccaccattttcagaaaagttctttctagtagtaattgagaaggacagcaataataactctattctgcatatgtggcaccttcatcttaaatctgtacaagcatgtttagctaaagcttcagaaggggcttcctctgagagtctactttcagtccctggacagaagaacgtagattcttctccagaaacctctcctagtgtgagccccatgccacattcttcatcaattgccaatcttcaaactgccagtaaacttattctgagttctagactggtgtatagccaaccccttgatctcccagaatcagttgaagtaataagagcaacgccttcagcaggccatctgagttcttcttcaatttatccagtgtgccttgcaccttatttagtggttacaacttgttctgacaataaagtacgcttctggaaatgttgtatggaagccaacccagagtgtaataaaagtgatgagaaagaaatttatcattggaagagatggcctttgatgaatgatgaaggagaagataatagcagtacagtgagcattgtgggaagaccagttgctgttagctgttcatacacaggtcgccttgcagtggcttataagcagcctatccaccataatggttttgtttctaaagaattttccatgcatgtttgtatatttgaatgtgaatctacaggaggatcagagtgggttttagaacaaacaattcatcttgatgatttggttaaggttgggagtgtacttgattcaagggtcagcgtcgacagtaatctgtttgtgtatagcaagtcagatgcactcttgagcaaggatagatatcttattccgaatatcaaacatttagtacatttggactgggtatcaaaagaagatggctcccacattcttacagtgggagtcggtgcgaatatcttcatgtatggaaggctttcaggaattgtgactgagcaaaccaacagtaaggatggagtagctgtcatcactttaccactaggtggtagtatcaagcaaggagttaagtcaagatgggttcttcttagatctatagacttggtatcttctgttgatggtactccttcactgcctgtttctctctcttgggtaagagatgggatattggtggtaggaatggattgtgaaatgcatgtatatgcacagtggaagcatgctgtcaaatttggagacactgaagctgatagttctaatgcagaagaggcagcaatgcaagatcattcgacctttaaatctaatatgctggcaagaaaaagtgttgttgaaggaacagctatttctgatgatgttttttgttcaccaactgtaattcaagatggtggcttatttgaggctgcacatgtactttcccctactcttccacaatatcatccaactcagctgttagaattgatggatttagggaaagtgcgaagggctaaagccattctctctcatttagtaaaatgtattgcaggtgaagtagcaatagttagagatcctgatgctggagaaggaactaagcgacatctctctcgaactattagtgtaagtggcagtacagcaaaggaaacagtcaccgtaggaaaagatggtactcgagattatactgagatagattctatccctccactaccactatatgcattacttgctgcagatcaagatacatcctacagaatttcagaagaaagtacaaagataccacagagctatgaagatcagacagtaagtcaaccagaggatcagtattcagagctgtttcaaatccaggatataccaacggatgatattgatttagagcctgaaaagagagaaaacaaatcaaaagtaataaatctttctcaatatggaccagcttactttggccaagaacatgcaagggtactttcaagtcatcttatgcactcaagtctaccaggccttacccgtttggagcagatgttccttgtagctttggctgatacagtggctactactagtactgagcttgatgaaagcagagataagagttgctcaggaagagatacattagatgagtgtggtttgagatacttgttagctatgcgcctacacacatgccttttgacatcgctgcctcctttataccgagtgcagctacttcatcaaggtgtctctacatgccattttgcctgggcttttcattctgaggctgaagaagaactgattaatatgattccagcaattcagagaggggacccccagtggtctgaattaagagctatgggcataggatggtgggtgaggaacattaacacgcttcgaagatgcattgaaaaggttgccaaagcttcttttcaaaggaacaatgatgccttagatgctgcactattctacctttcaatgaagaagaaagcagtagtgtggggtctgtttaggtcacagcatgatgaaaaaatgacaacatttttcagccacaactttaatgaagatagatggcgaaaagctgctttgaaaaatgctttttccttacttggaaaacaacgctttgaacaatcggctgcttttttcttgctagctggttcattgaaagatgccatagaggtatgtcttgaaaaaatggaagatattcagctagccatggttattgcccgtttatatgaatctgaatttgagacttcatccacttatatatccatcctaaatcagaagattttgggttgccaaaaggatggctcaggattcagttgcaaaagattacatcctgatcctttcctgcgtagtcttgcctattgggtaatgaaagattacacccgagccttggacacattactggaacaaacaccaaaggaggatgatgaacatcaagttatcatcaagtcttgtaacccggtggcatttagtttttataactaccttcgaactcatcctttgctcattcgaagaaatcttgcctcccctgaaggaactttggcaaccttaggtctcaaaactgagaagaactttgttgataaaattaacctcatagaaagaaaattattctttaccactgcaaatgctcattttaaagttggatgccctgttttagccttggaggtactctccaaaattccaaaagtaaccaaaacatctgccttatctgcaaaaaaagatcagcctgacttcatttctcacaggatggatgatgtaccttcacattcaaaagctctgagtgatggcaatggaagttctggcattgaatggtcaaatgtaacttcatcacagtatgactggagtcagccaatagtaaaagttgatgaggaacctcttaatcttgattggggtgaagatcacgacagtgccttagatgaagaggaagacgatgctgttggtttagtgatgaaaagtacagatgccagggaaaaagataaacaatcagatcagaaggcctcagaccctaacatgttattaacacctcaggaagaggatgatcctgaaggtgatactgaagttgatgtgattgctgaacaactaaaattcagagcttgtttaaagatccttatgactgaattaagaacattggctacaggttatgaagtagatggaggaaaactcagatttcaactctataactggcttgaaaaggaaattgctgccttgcatgagatatgtaatcatgaatcagttattaaagagtattccagtaagacatattccaaagtagagagtgatctgctggatcaggaagaaatggtagacaaaccagatattggttcctatgagcgccatcaaatagaaagaagaagattgcaggccaaacgagagcatgcagaaagacgaaagtcgtggttgcagaaaaaccaagatctcctgagagtatttctcagctactgtagccttcatggggcccaaggtggtggtttggcttcagtaaggatggaactcaaatttttgctacaagaatcacaacaggaaactacagtaaagcagctccagtctccactaccactgcctaccaccctacctctgctttcagcaagtattgcgtcaacaaaaacagtcatagctaatcctgtattgtacttaaataatcacatccatgatatactttatactattgttcagatgaaaacaccacctcatcccagtattgaagatgtgaaggtgcacacacttcattcactagcagcatcactttctgcatcaatttaccaagcattatgtgacagtcatagctacagtcaaacagaaggaaatcagtttacaggaatggcttatcaaggacttcttttaagtgatcgtagaagactaaggacagaaagcattgaagaacacgcaacaccaaattcatctcctgctcaatggcctggtgtgagctcacttattaatcttttgagttcagcccaagatgaagaccagccaaaactgaacattttgctatgtgaagctgttgttgctgtttacttaagtttattgatacatgctcttgccacaaattcctccagtgaattatttcggcttgcagcccacccattaaataatcgaatgtgggctgctgtttttggaggcggtgtaaaacttgttgtgaaacctcgaagacaatcagaaaatatttcagcacctcctgtcctttctgaagacatagataaacaccgtaggagatttaacatgagaatgctcgtccctggaaggcctgtaaaagatgctaccccaccaccggtgcctgcagaaagaccatcttacaaagaaaaatttattcctcccgaacttagtatgtgggattattttgttgcaaagccatttcttcctttgtctgatagtggtgttatatatgattctgatgaaagcattcatagtgatgaagaagatgatgcctttttttcagatacacaaatacaggagcaccaagatccaaattcctatagctgggctcttctacatttgacaatggttaaactagcacttcacaatgtcaagaatttctttcctattgctggactggaattctctgagctgcctgtaacatcaccattaggtattgctgtgattaaaaacttggagaactgggaacagatcttgcaagagaaaatggatcagtttgaaggtccaccccctaactatatcaacacatatccaactgacctttcagtgggagctggaccagctattcttcgaaataaagcaatgctagaacctgaaaataccccattcaagtcccgggattcttctgcatttccagtcaaacgactttggcatttccttgttaaacaagaggtccttcaagagacatttattagatatattttcactaagaaaagaaagcagagtgaggttgaagctgatctgggctatccaggtggaaaggcgaaagtcatccataaggaatctgatatgatcatggcattttctgttaataaggcaaattgtaatgaaattgttttggcttcaacacatgatgttcaagaacttgatgttacttctctactggcctgtcagtcatacatatggatcggagaagaatatgacagagaatccaaaagttcagatgatgttgattatcgtggttccactacaactctttatcaacccagtgcaacatcctattcagcaagtcaggtgcatccaccttcatctctgccatggctgggcactggacagactagcactggagctagtgtgcttatgaaaaggaatctacataatgttaagagaatgacttcacacccagtccatcaatactatcttacaggtgctcaggacggcagtgtacgaatgtttgaatggacgcggcctcagcaacttgtctgctttcgtcaagctggcaatgcaagagttactagattatattttaattcacaaggcaacaagtgtggtgttgcggatggagagggttttctgagtatctggcaagttaaccaaactgcatcaaatcctaaaccttatatgagttggcagtgccacagtaaagccacaagtgactttgcatttattacctcttcaagtctagttgccacatctggacactccaatgacaatagaaatgtttgcctctgggacacattaatatcacccggaaacagcctcattcatggtttcacgtgccacgatcatggtgccacggtactgcagtatgcacccaaacagcaactcctaatctcggggggtaggaaaggacacgtctgcatttttgacatcaggcaaaggcagctcattcacacgttccaggcccatgactcagctattaaggctctggccttggatccctatgaggaatattttaccacaggttcagcagaaggtaacataaaggtttggagattgacaggccatggcctaattcattcatttaaaagtgaacatgctaagcagtccatatttcgaaacattggggctggagtcatgcagattgacatcatccagggcaatcggctcttctcctgtggtgcagatggcacgctgaaaaccagggttttgcccaatgcttttaacatccctaacagaattcttgacattctataaagattggggttttatttttatatacatttcagttaaaaggcacactacagtcatcactaggcaattctgctttctaagcagttgtattgaaaacagagaatctctgtgtagaatttgaatatgacccaagctgagtattatctaaacaggttggtggaatgaatgcgcatgtaccttattatgctgacatactaaaaaaaataaaacctagtattgtatgaaggatagctattctttacagcatttagcaaacctgattcagaaaacatttgagattagcaaattagtaacttgaaataatgaaaaggacgtttataccaaattaaggaagaaaatgttgctgatttgggtttttcttcctgttcttaccactgactgaagcatgcctgcagtctcctcctctgttgaatgaaggataatcataaggtgtttgttaggagcgctagaccacctggaaaactttcttagctgtggagcagtgcgcagtgaccagttctctgctgtgagaggccgtttccattctttcctgctgaatatttttcctgttagtgtttatactgagctagtactgtaacttgcaaatgagtgcaaatttaaatgcaatgttttactcacaatttgcacattcacattttttggactgctagtttttctatttaaatatttgccttcatgttaggaatgtactatgtgaacatgacatatttgtagttaaccaaacacaccttcttagtccagtttagtactttttcttttcgtgtattcaaggttaaacacccaaacatttaaggatatgttgaaactacaccaatagagcatttcatatcataattaaaatgaatgttaggcttcttgtggccagttaatagttgatgagattggtgacattatttattgccacagcctattgtataaactatgcagagttaaatatttgcttgtaaaatattagccaatgttgtcattattttgatgtatttccttggttatgaccaaaaatatgttgagatactgaaactaatgtctgtgtgtttaaatgtttaccagcaaattgtcttatcatgttaatgagaatgttcaatgcctgtgtggtaaatagtaaatacaatggcataaaagtaactttctctgaagatgtgatgttcaggctgtgaaatatatatgtaaaagaaaaataaatgttatttgttagagtttttagtttgatactgtttttgaccattgagatttttaatttgataaaa

SEQ ID NO: 5 - DNA, 9084 bp, Homo sapiens
  CDS (1)..(9084)
atgaacctgcaccaggtgctgaccggggctgtgaaccctggcgaccactgcttctccgtgggcagcattggcgaccagcgcttcacggcttatgcatctggatgtgacattgtaatactgggaagcgattttgaaagattacagataatcccaggagctaaacatggaaatattcaagtgggatgtgtagactgttcaatgcaacaaggcaagattgcagcgtcttatggaaatgttatctccatttttgaaccagttaacctaccaaaacaaaagaaaaatttggaattatatagtcagtggcagaaaagtggccaattttttctggaatcaatagcacacaatataacctgggatcccacaggcagtcgtcttttaactggttccagctatttgcaactctggtccaatactaacttggagaagccaactgaagatgaaaatttaaataaaacagatcttaactttggagattggaaatgcatttggcattgcaaaactgcttcccaagttcatttaatgaaattttcaccagatggagaattttttgccactgctgggaaggatgactgtcttttgaaggtttggtataatgtagaaaactggcggacagctgttacttctccagatggaagttcagaaaaacaatcccaaggagaaattgacttttcttttgtgtatctggcccatcctcgagcagtaaatggattttcctggcgtaaaacaagcaaatatatgcctagggcttctgtatgtaatgtactgttgacttgctgcaaagataatgtgtgtcgtctttgggtagagacatttttaccaaatgattgtttgctatacggaggtgactgcagccattggactgaatcaattaatttaacaaataacttcaagagaaatgcttccagtaaagaacgagttcaaaatgctttagaagtaaatctgagacattttcgtagaggtcggaggagatcacttgctcttgtagcacatacgggatatctaccacatcagcaggatcctcatcatgttcacaggaacactccactgcatgccaatgcactttgccactttcatattgcagccagcatcaacccagccacagacattccacttcttccatctattacatctctgagtctaaatgaaaatgaagagaagaccggaccttttgttgtacactggctaaacaataaagaactgcattttactttgtccatggaagtttttttacagcaacttagaaaaagttttgaacaaccatcttctgaggccagtgtagaagattctaatcaggcagatgtaaaatctgatgaagaaactgatgatggtgttgatgatctgaaaataaatcccgaaaagaaggaattaggctgtgataaaatggtaccaaactcaagttttacatcattatcgtcagctgccattgatcatcagattgaagtacttctgtctgaatggagtaaaaatgcagatatgctatttagtattcatcccatggatggttctttgctagtttggcatgtggattggctggatgaataccagcctggtatgtttcgtcaagtacaggtgtcctttgtttccagaattccagtagctttccccacaggtgatgcaaactctctctgtaaaagcataatgatgtatgcctgtaccaagaatgttgacttggctattcagcaggggaaacaaaaaccttctggcctcacccgttccacatcaatgcttatttcttctggtcacaataaatcatctaatagtttaaaattaagtatttttacgcctaatgttatgatgatatcaaaacatgctgatggttctctgaatcagtggctggtcagttttgccgaggaatctgctttttctactgttctcagtatttcccacaaatccagatattgtggtcatcgttttcatcttaatgatttagcttgccactcagtattaccattattgctgacaacatcacaccataatgcattaaggacaccagatgttgataacccagagcaaccttttgatgctctaaatattgaagaatgctctttgacacaacaaaataaaagcactgttgacgtggcatttcaggatcccagtgcagtttacagtgagcttattctgtggagggttgacccagttgggccattgtctttttctggaggagtttctgagcttgcccggattaattctcttcatgtttctgccttttccaatgtggcatggctgcccactcttatacccagttattgtctgggtgcatactgcaactctcctagtgcatgctttgtagccagtgatggacaatatctgagattatatgaagcagttattgatgctaagaaacttttatctgagctttctaaccctgaaatttctaaatatgttggtgaagtctttaacatcgtcagtcaacaatcaacagccaggccaggatgcattattgcattagatcccattaccaaacttcatggcagaaaaacccaactgcttcatgtttttgaagaagacttcattttgaataaccttgagaagaaaagccttggcaaagacagcattttatctaatgcaggcagctcacctaatggattttctgagaagttctacctaattgtaatagaatgcactcaagacaaccgttcactgttacacatgtggaatttacatctaaagtcaattcctgtctcattagatgaaaaagtagatacaaaattatccgaagcggtttggcagccagaagaacattattcttcttctccagagaagatcctatctcctttttcacaaaagtatcaggcttgcagagcaaatctccagagtaccagcaggttgactctgttttcagaaatggtttatagccaagaattgcatttaccagaaggagttgagataataagtattaagccatcagcaggacatctgagttcatcttctatatatcctgcatgcagtgctccttatttattggcaacttcatgttcagatgagaaagtaagattctggagatgcagagtaacagatggagaatctgccacgtcaaagaatggaaaaattgatcttgcatacatttgggaagaatggccattacttattgaagatggacttcagagcaatagtagtataactgtacctggtaggcctgtagaagttagctgtgcacatacaaatcgtttagcagtagcttataagcagcctgcatctaatagtagatcttcccaggactttgtgatgcatgtaagtatttttgaatgtgagtcaacaggaggttcatgttgggtccttgagcagacaattcatttagatgagttaagcacagtattggattctggcattagtgttgatagcaatttagtggcctataataaacaagacatgtatttatctagtaaagagaatatcacatcaaacacaaagcatttagttcacttagattggatgtctagagaagacggttctcatatcctgactgtaggaattggatcaaaactttttatgtatggacccctggctggcaaggtacaagaccaaactggtaaggaaaccctggcatttcctctctgggagagtaccaaagttgtgcccctttctaaatttgtactattacgaagtgtggacctagtttcttctgtagatggctccccaccttttcctgtttctttatcgtgggtccgggatggcatccttgtggtaggaatggactgtgaaatgcatgtgtattgccaatggcaaccatcttctaaacaagaacctgttataacagattcgtacagtgggagcactccatctataacaagtttaataaaacagagtaactccagttctgggttacatcctccaaagaaaactctgactcgatccatgaccagtcttgcacagaaaatctgtggaaagaaaactgcattcgatccttcagtggatatggaagattcaggtctttttgaagcagctcatgtactttccccgactctacctcagtatcatcccttgcagcttttggaactcatggatcttggtaaagttcggagagccaaggccatcttgtcccatcttgttaagtgcattgctggggaagttgtggctctgaatgaagctgaatctaatcatgaacgccgccttaggtctctcacaatcagtgctagtggaagcactaccagagacccccaggcattcaacaaggctgaaaatacagattacacagaaatagattctgttcctccacttcctttatatgccttacttgcagcagatgatgatagctgttactcatctttggagaaatctagtaatgagagtacgttaagtaaatcaaaccaattatctaaagaaagttatgatgagctttttcagactcaacttctaatgactgatactcatatgttagagacagatgaagaaaatacaaagcctagagttattgacctttcacagtacagtccgacttactttggacctgagcatgctcaggttctttctggccacttacttcattctagtttaccaggactcagccggatggagcagatgtctttgatggccttagcagatacaattgcaactacaagcactgatattggagaaagccgagacagaagccaaggtggagaaactcttgatgaatgtgggttaaaatttcttttggctgttcgactccatacctttcttacaacttcccttccagcctatcgagctcaactccttcaccaaggcctgtctacaagtcattttgcttgggcatttcactcagtagcagaagaagaactgctgaacatgttgccagccatgcagaaagatgatcccacttggtctgaactaagagctatgggtgtggggtggtgggtccggaatacccgcatcttacgcaaatgcatagaaaaagtagctaaagcagccttttatagaaagaatgatcctttagatgctgccattttttaccttgcaatgaaaaagaaagctgtgatttggggattatatagagctgaaaaaaacaccaggatgacacagttttttggacacaattttgaggatgagaggtggcgtaaagcagctttaaagaatgctttttctttgctaggcaaacaaagatttgaacattctgcagcattttttcttttagctggttgcctcagagatgcaattgaggtatgtcttgagaaattgaatgacattcagttggctcttgtaatagcaagactctatgagtctgaatttgatacatctgcagcatataaatctattttacgtaaaaaagttttgggaatcgattctcctgtcagtgaactgtgttcattgaacataaatatgcatcatgatccttttcttcggagcatggcatattggattttggaagattatagtggtgctctggaaacattaataaagcaacctatcagagagaatgatgatcaagttttatcagccagtaatcctacagtttttaatttctacaattatctaagaacacatcctcttttgctgagacgtcattttggatcatctgatacattttccacacatatgagcctaacaggaaaaagtggactggcaggaacaattaatttaagtgaaagacgtttattttttaccactgccagtgctcatttaaaagctggctgcccaatgttggctttggaagtattatcaaagatgcctaaagtcatcaagaaaacaagacctttttatagggcttctagttttctggatactagtaaagactgttctccttcttctccattaaagttggatgcaagggaagataagtcttctgctgttgattggtcacagtcactgataaatggttttggatcttcttcagagggttcctcagagaagcaatcaaactccactctttcttttgactggagccaaccaagtgttgtgtttcaggatgactctttagagttaaaatgggacagtgataatgatgaagaaaatgaggatgtccctatttcaatgaaagaactaaaacctttacagagaaaaacagataaaaagttggatgacataagttctaactacacagaatctttcagcacactagatgaaaatgaccttttaaatccatcagaagatataattgcagttcagttaaaatttagagcatgtttaaagattctcacagtagaacttcgtactttatctactggctatgaaatagatggtggaaaattgcgttaccaactataccactggcttgaaaaagaggtgatagctcttcagaggacttgtgacttttgctcagatgctgaagaactacagtctgcatttggcagaaatgaagatgaatttggattaaatgaggatgctgaagatttgcctcaccaaacaaaagtgaaacaactgagagaaaattttcaggaaaaaagacagtggctcttgaagtatcagtcacttttgagaatgtttcttagttactgcatacttcatggatcccatggtgggggtcttgcatctgtaagaatggaattgattttgcttttgcaagaatctcagcaggaaacatcagaaccactattttctagccctctgtcagagcaaacctcagtgcctctcctctttgcttgtacagccaatgccaaaacagtagttgccaatccattattgcaccttagtaatctgacacatgatattctccatgccataataaactttgattcaccaccccaccctgatatccaaagcaataaagtgtatgtaatgcatactttagcagcttcactttctgcttgtatttatcagtgcctttgtggtagtcataactacagttcatttcagacgaatcagtttactggaatggtatatcagacagtactgcttcctcatcgaccttctttgaaaacaggaagcttagatgaagcattaactcccaatacgtcaccagctcaatggccaggaataacttgtctaattcgacttttgaattcttctggcgaggaagcccagtcagggcttacagtcttgctctgtgagattctcacagcagtgtatcttagtctcttcatccatggcctggccacacattcaagtaatgagctatttcggattgtggcccatcctctaaatgagaaaatgtggtctgctgtgtttggtggaggtgcacatgttcctagcaaagaacagacacattcaaaaactttacctgtttcttcactagttgaagaaggagaaaaacagaacaaacgttttaggccgtcaaaaatgtcttgcagagaatctgccccactgaccccttcctcggcaccagtaagccaggagtcactggcggttaaagaaaagttcatcccacctgagctcagtatctgggactatttcatagctaagccttttctaccctcttctcaaagtagagccgaatatgattcagaggagagtctgggaagtgatgatgatgacaatgatgatgatgatgatgttttagcatcagatttccatctccaggaacattctaattcaaattcatatagttggtccttgatgcggttggcgatggtgcaattggtgctcaacaatttgaagactttttatcccttcgcaggtcatgatcttgcagagcttccagttagttcacctctttgtcatgcggttctaaaaactcttcaatgttgggaacaagttcttctccgacgacttgaaatccatggtgggccacctcaaaattatatcgcaagtcataccgccgaagagagtttgtctgcaggtcctgcaattcttcgccacaaagctttactggaacctacaaacactcctttcaaatccaaacaccatctggcactgtctgtgaagaggctttggcagtatttggtgaagcaggaagaaattcaggaaacctttatcaaaaatatattcacaaagaaacggtgtctaaatgagatagaagcagatttgggatatcctggaggtaaagcaagaattattcataaggaatctgatatcattactgcgtttgctgttaataaggcaaatagaaactgcatagcaatcgcttccagtcatgatgttcaagaactggatgtttctggaattctggccacacaggtctacacttgggtagatgatgatatagaagtggaaaccaaaggatcagaagatttcttggttatacatgctcgtgatgatttaacagctgttcaaggtacaactccatatacacatagcaatcctggcactccaatcaacatgccatggcttggtagtacacagactggcagaggagcatctgtgatgattaagaaagccattaataatgttagaagaatgacttctcatccaactcttccttactatctgacaggagctcaagatggaagtgtcagaatgtttgaatggggccattctcaacaaataacctgttttcgatctggtggcaattcaagagttacaagaatgagatttaactatcagggaaataagtttggaatagttgatgctgatggatatttaagtttgtatcaaacaaactggaaatgttgtccagttactggaagcatgcctaagccatacctgacttggcagtgtcataacaaaacagccaatgattttgtcttcgttagttcctcctctctgatagctacagctggtctttcaactgacaatagaaacgtatgtttgtgggatactcttgtagcacctgccaatagtttagtccatgcatttacctgccatgacagtggagccacagttttagcatatgctccaaaacatcagctactaatatcaggtggcagaaaaggttttacatatgtatttgacctttgtcaacgacaacagaggcagcttttccagagccatgattctcctgttaaagccgttgctgttgatccaactgaagagtactttgttacaggatctgccgaaggcaatataaagatttggagtctctctacctttggtcttctccatacttttgtcagtgaacatgctcggcagtccatttttagaaatattggaactggagtgatgcaaattgagacagggcctgcaaatcacattttctcctgtggagctgatggaacaatgaaaatgagaatactgccagatcagtttagccctttaaatgaagtgttgaaaaatgatgtgaaatttatgctataa

SEQ ID NO: 6 - protein, 3027 aa, Homo sapiens
MNLHQVLTGAVNPGDHCFSVGSIGDQRFTAYASGCDIVILGSDFERLQIIPGAKHGNIQVGCVDCSMQQGKIAASYGNVISIFEPVNLPKQKKNLELYSQWQKSGQFFLESIAHNITWDPTGSRLLTGSSYLQLWSNTNLEKPTEDENLNKTDLNFGDWKCIWHCKTASQVHLMKFSPDGEFFATAGKDDCLLKVWYNVENWRTAVTSPDGSSEKQSQGEIDFSFVYLAHPRAVNGFSWRKTSKYMPRASVCNVLLTCCKDNVCRLWVETFLPNDCLLYGGDCSHWTESINLTNNFKRNASSKERVQNALEVNLRHFRRGRRRSLALVAHTGYLPHQQDPHHVHRNTPLHANALCHFHIAASINPATDIPLLPSITSLSLNENEEKTGPFVVHWLNNKELHFTLSMEVFLQQLRKSFEQPSSEASVEDSNQADVKSDEETDDGVDDLKINPEKKELGCDKMVPNSSFTSLSSAAIDHQIEVLLSEWSKNADMLFSIHPMDGSLLVWHVDWLDEYQPGMFRQVQVSFVSRIPVAFPTGDANSLCKSIMMYACTKNVDLAIQQGKQKPSGLTRSTSMLISSGHNKSSNSLKLSIFTPNVMMISKHADGSLNQWLVSFAEESAFSTVLSISHKSRYCGHRFHLNDLACHSVLPLLLTTSHHNALRTPDVDNPEQPFDALNIEECSLTQQNKSTVDVAFQDPSAVYSELILWRVDPVGPLSFSGGVSELARINSLHVSAFSNVAWLPTLIPSYCLGAYCNSPSACFVASDGQYLRLYEAVIDAKKLLSELSNPEISKYVGEVFNIVSQQSTARPGCIIALDPITKLHGRKTQLLHVFEEDFILNNLEKKSLGKDSILSNAGSSPNGFSEKFYLIVIECTQDNRSLLHMWNLHLKSIPVSLDEKVDTKLSEAVWQPEEHYSSSPEKILSPFSQKYQACRANLQSTSRLTLFSEMVYSQELHLPEGVEIISIKPSAGHLSSSSIYPACSAPYLLATSCSDEKVRFWRCRVTDGESATSKNGKIDLAYIWEEWPLLIEDGLQSNSSITVPGRPVEVSCAHTNRLAVAYKQPASNSRSSQDFVMHVSIFECESTGGSCWVLEQTIHLDELSTVLDSGISVDSNLVAYNKQDMYLSSKENITSNTKHLVHLDWMSREDGSHILTVGIGSKLFMYGPLAGKVQDQTGKETLAFPLWESTKVVPLSKFVLLRSVDLVSSVDGSPPFPVSLSWVRDGILVVGMDCEMHVYCQWQPSSKQEPVITDSYSGSTPSITSLIKQSNSSSGLHPPKKTLTRSMTSLAQKICGKKTAFDPSVDMEDSGLFEAAHVLSPTLPQYHPLQLLELMDLGKVRRAKAILSHLVKCIAGEVVALNEAESNHERRLRSLTISASGSTTRDPQAFNKAENTDYTEIDSVPPLPLYALLAADDDSCYSSLEKSSNESTLSKSNQLSKESYDELFQTQLLMTDTHMLETDEENTKPRVIDLSQYSPTYFGPEHAQVLSGHLLHSSLPGLSRMEQMSLMALADTIATTSTDIGESRDRSQGGETLDECGLKFLLAVRLHTFLTTSLPAYRAQLLHQGLSTSHFAWAFHSVAEEELLNMLPAMQKDDPTWSELRAMGVGWWVRNTRILRKCIEKVAKAAFYRKNDPLDAAIFYLAMKKKAVIWGLYRAEKNTRMTQFFGHNFEDERWRKAALKNAFSLLGKQRFEHSAAFFLLAGCLRDAIEVCLEKLNDIQLALVIARLYESEFDTSAAYKSILRKKVLGIDSPVSELCSLNINMHHDPFLRSMAYWILEDYSGALETLIKQPIRENDDQVLSASNPTVFNFYNYLRTHPLLLRRHFGSSDTFSTHMSLTGKSGLAGTINLSERRLFFTTASAHLKAGCPMLALEVLSKMPKVIKKTRPFYRASSFLDTSKDCSPSSPLKLDAREDKSSAVDWSQSLINGFGSSSEGSSEKQSNSTLSFDWSQPSVVFQDDSLELKWDSDNDEENEDVPISMKELKPLQRKTDKKLDDISSNYTESFSTLDENDLLNPSEDIIAVQLKFRACLKILTVELRTLSTGYEIDGGKLRYQLYHWLEKEVIALQRTCDFCSDAEELQSAFGRNEDEFGLNEDAEDLPHQTKVKQLRENFQEKRQWLLKYQSLLRMFLSYCILHGSHGGGLASVRMELILLLQESQQETSEPLFSSPLSEQTSVPLLFACTANAKTVVANPLLHLSNLTHDILHAIINFDSPPHPDIQSNKVYVMHTLAASLSACIYQCLCGSHNYSSFQTNQFTGMVYQTVLLPHRPSLKTGSLDEALTPNTSPAQWPGITCLIRLLNSSGEEAQSGLTVLLCEILTAVYLSLFIHGLATHSSNELFRIVAHPLNEKMWSAVFGGGAHVPSKEQTHSKTLPVSSLVEEGEKQNKRFRPSKMSCRESAPLTPSSAPVSQESLAVKEKFIPPELSIWDYFIAKPFLPSSQSRAEYDSEESLGSDDDDNDDDDDVLASDFHLQEHSNSNSYSWSLMRLAMVQLVLNNLKTFYPFAGHDLAELPVSSPLCHAVLKTLQCWEQVLLRRLEIHGGPPQNYIASHTAEESLSAGPAILRHKALLEPTNTPFKSKHHLALSVKRLWQYLVKQEEIQETFIKNIFTKKRCLNEIEADLGYPGGKARIIHKESDIITAFAVNKANRNCIAIASSHDVQELDVSGILATQVYTWVDDDIEVETKGSEDFLVIHARDDLTAVQGTTPYTHSNPGTPINMPWLGSTQTGRGASVMIKKAINNVRRMTSHPTLPYYLTGAQDGSVRMFEWGHSQQITCFRSGGNSRVTRMRFNYQGNKFGIVDADGYLSLYQTNWKCCPVTGSMPKPYLTWQCHNKTANDFVFVSSSSLIATAGLSTDNRNVCLWDTLVAPANSLVHAFTCHDSGATVLAYAPKHQLLISGGRKGFTYVFDLCQRQQRQLFQSHDSPVKAVAVDPTEEYFVTGSAEGNIKIWSLSTFGLLHTFVSEHARQSIFRNIGTGVMQIETGPANHIFSCGADGTMKMRILPDQFSPLNEVLKNDVKFML

SEQ ID NO: 7 - DNA, 9111 bp, Homo sapiens
  CDS (1)..(9111): DMXL2 NP_056078.2
atgcatctgcatcaggtcctcaccggagctgtcaaccctggagacaactgctactccgtgggcagcgtcggggatgtccccttcacggcatatggatcaggctgtgatattgttattttggcaaatgactttgaatgtgtacagatcattcctggtgctaagcatggaaacatccaagtcagctgtgtggagtgttctaaccaacaaggaagaattgcagcttcatatggtaatgctgtttgtatatttgagcccttgggcataaattctcataaaagaaattgtcaactcaagtgccagtggcttaaaactgggcagttttttttgagttctgtgacatacaacttagcatgggatcctcaagataatagattgttgacagcaactgattctattcagttgtgggctcctccaggagatgatattctggaagaggaggaagaaattgataatacagttcctcctgttttaaatgattggaagtgtgtctggcagtgcaaaacctcagtatctgtacatttgatggaatggtctcctgatggtgaatattttgctactgctggaaaggatgattgtcttttgaaagtgtggtatcctatgactggttggaagtcttcaattatacctcaggatcatcatgaagtaaaaaggagacagtcctctactcaattttcttttgtttacttggcacatccccgagctgtgacaggtttttcgtggcgcaaaactagcaagtatatgcccaggggttctgtctgtaatgtgttgttaacttcatgtcatgatggtgtgtgccggctctgggcagaaactttattaccagaagactgtcttttgggtgagcagatttgtgagactaccacttccagcattgccagcagcctttctcatgctggaagacacaaagacagaatacagcatgctcttgagacaatacaccatttgaaaaatttaaggaaaggacagaggaggtcatctgttcttgtaactcatgctgaattaatgcccgaccagacagcaatgcatgaagttcaaagacacatttcccaccatgcaaatgcactctgtcattttcatattgcagcaagcatcaaccctgccacagatattccaaatgtcttggttggcactgcatttaatgttgatgatggaaatgggggctttgtagttcattggttaaacaacaaggaatttcattttacatcatctacagaagtatttatgcatcaattacgaaaactttctgataagcaggtagatcatgaaaatgatgatgcagatagagaagatgaggaacattcacaggaggatagagaacggggtttacatatgaaattagaccatgatttatccctggatagagaatctgaggcaggtacaggatcatcagaacatgaagatggagaaagagaaggaagtcctagaacttactcacgacttagtgtaccaatgccactgcctacggttctgcttgatcggaagattgaaacgctgctaactgaatggaataagaatcctgatatgctttttacaatacaccctgtagatggtacctttctagtgtggcatgtgaagtatttggatgaatataatcctggaatatttagacaagttcaggtttctttttcttctcggattcctgttgcatttccctctggtgatgcaagctctcttagtaaaaatatcatgatgtatgcctgtataaatgcgacaaaagattctcaccacacgctgttacaccaggaggggatgtctgtaggcagtcctcacggatcacagccacactctagatcccacagtacacatatgaacatcttagctcccacagtaatgatgatctctaaacacatagatggttctttaaatcagtgggcagtcacttttgctgataagtctgcctttaccactgttctaactgtatctcacaaatttagatattgcggtcatcgatttcacctcaatgacctggcatgtcattcagttttaccactgttattgacatcctctcatcataatgctctattgactcctgaattagattgtcagtgggactcagacaataaattaagtagattaatggaccctgtaaaacatataaaaggttcctcgaaacaacctcttagaaatgcagcaactcgtacatttcatgacccaaatgcaatctacagtgaacttattctgtggcgtgtagacccaataggacctttgtcatacactggaggagtatcagaattggctcgaattaactctttacatacctcagcgttctctaatgtggcttggcttccaactctcattcccagttactgtctaggcacatactgcaattctgcaagtgcttgctttgttgcttctgatggcaaaaatctgagactctatcaagctgtagtggatgcaaggaaattattagatgaattgtcagacccagaatcttcaaaacttattggagaagtgtttaatattgtgagccaacagtctactgctcgacctggctgcattattgaactcgacgcaataaccaaccaatgtggctcaaatacacagttgcttcatgtgtttcaagaagacttcattataggatataaaccacataaggaagatatggagaaaaaggaaacagaaatattttttcagccatcacaaggataccgcccaccaccattttcagaaaagttctttctagtagtaattgagaaggacagcaataataactctattctgcatatgtggcaccttcatcttaaatctgtacaagcatgtttagctaaagcttcagaaggggcttcctctgagagtctactttcagtccctggacagaagaacgtagattcttctccagaaacctctcctagtgtgagccccatgccacattcttcatcaattgccaatcttcaaactgccagtaaacttattctgagttctagactggtgtatagccaaccccttgatctcccagaatcagttgaagtaataagagcaacgccttcagcaggccatctgagttcttcttcaatttatccagtgtgccttgcaccttatttagtggttacaacttgttctgacaataaagtacgcttctggaaatgttgtatggaagccaacccagagtgtaataaaagtgatgagaaagaaatttatcattggaagagatggcctttgatgaatgatgaaggagaagataatagcagtacagtgagcattgtgggaagaccagttgctgttagctgttcatacacaggtcgccttgcagtggcttataagcagcctatccaccataatggttttgtttctaaagaattttccatgcatgtttgtatatttgaatgtgaatctacaggaggatcagagtgggttttagaacaaacaattcatcttgatgatttggttaaggttgggagtgtacttgattcaagggtcagcgtcgacagtaatctgtttgtgtatagcaagtcagatgcactcttgagcaaggatagatatcttattccgaatatcaaacatttagtacatttggactgggtatcaaaagaagatggctcccacattcttacagtgggagtcggtgcgaatatcttcatgtatggaaggctttcaggaattgtgactgagcaaaccaacagtaaggatggagtagctgtcatcactttaccactaggtggtagtatcaagcaaggagttaagtcaagatgggttcttcttagatctatagacttggtatcttctgttgatggtactccttcactgcctgtttctctctcttgggtaagagatgggatattggtggtaggaatggattgtgaaatgcatgtatatgcacagtggaagcatgctgtcaaatttggagacactgaagctgatagttctaatgcagaagaggcagcaatgcaagatcattcgacctttaaatctaatatgctggcaagaaaaagtgttgttgaaggaacagctatttctgatgatgttttttgttcaccaactgtaattcaagatggtggcttatttgaggctgcacatgtactttcccctactcttccacaatatcatccaactcagctgttagaattgatggatttagggaaagtgcgaagggctaaagccattctctctcatttagtaaaatgtattgcaggtgaagtagcaatagttagagatcctgatgctggagaaggaactaagcgacatctctctcgaactattagtgtaagtggcagtacagcaaaggaaacagtcaccgtaggaaaagatggtactcgagattatactgagatagattctatccctccactaccactatatgcattacttgctgcagatcaagatacatcctacagaatttcagaagaaagtacaaagataccacagagctatgaagatcagacagtaagtcaaccagaggatcagtattcagagctgtttcaaatccaggatataccaacggatgatattgatttagagcctgaaaagagagaaaacaaatcaaaagtaataaatctttctcaatatggaccagcttactttggccaagaacatgcaagggtactttcaagtcatcttatgcactcaagtctaccaggccttacccgtttggagcagatgttccttgtagctttggctgatacagtggctactactagtactgagcttgatgaaagcagagataagagttgctcaggaagagatacattagatgagtgtggtttgagatacttgttagctatgcgcctacacacatgccttttgacatcgctgcctcctttataccgagtgcagctacttcatcaaggtgtctctacatgccattttgcctgggcttttcattctgaggctgaagaagaactgattaatatgattccagcaattcagagaggggacccccagtggtctgaattaagagctatgggcataggatggtgggtgaggaacattaacacgcttcgaagatgcattgaaaaggttgccaaagcttcttttcaaaggaacaatgatgccttagatgctgcactattctacctttcaatgaagaagaaagcagtagtgtggggtctgtttaggtcacagcatgatgaaaaaatgacaacatttttcagccacaactttaatgaagatagatggcgaaaagctgctttgaaaaatgctttttccttacttggaaaacaacgctttgaacaatcggctgcttttttcttgctagctggttcattgaaagatgccatagaggtatgtcttgaaaaaatggaagatattcagctagccatggttattgcccgtttatatgaatctgaatttgagacttcatccacttatatatccatcctaaatcagaagattttgggttgccaaaaggatggctcaggattcagttgcaaaagattacatcctgatcctttcctgcgtagtcttgcctattgggtaatgaaagattacacccgagccttggacacattactggaacaaacaccaaaggaggatgatgaacatcaagttatcatcaagtcttgtaacccggtggcatttagtttttataactaccttcgaactcatcctttgctcattcgaagaaatcttgcctcccctgaaggaactttggcaaccttaggtctcaaaactgagaagaactttgttgataaaattaacctcatagaaagaaaattattctttaccactgcaaatgctcattttaaagttggatgccctgttttagccttggaggtactctccaaaattccaaaagtaaccaaaacatctgccttatctgcaaaaaaagatcagcctgacttcatttctcacaggatggatgatgtaccttcacattcaaaagctctgagtgatggcaatggaagttctggcattgaatggtcaaatgtaacttcatcacagtatgactggagtcagccaatagtaaaagttgatgaggaacctcttaatcttgattggggtgaagatcacgacagtgccttagatgaagaggaagacgatgctgttggtttagtgatgaaaagtacagatgccagggaaaaagataaacaatcagatcagaaggcctcagaccctaacatgttattaacacctcaggaagaggatgatcctgaaggtgatactgaagttgatgtgattgctgaacaactaaaattcagagcttgtttaaagatccttatgactgaattaagaacattggctacaggttatgaagtagatggaggaaaactcagatttcaactctataactggcttgaaaaggaaattgctgccttgcatgagatatgtaatcatgaatcagttattaaagagtattccagtaagacatattccaaagtagagagtgatctgctggatcaggaagaaatggtagacaaaccagatattggttcctatgagcgccatcaaatagaaagaagaagattgcaggccaaacgagagcatgcagaaagacgaaagtcgtggttgcagaaaaaccaagatctcctgagagtatttctcagctactgtagccttcatggggcccaaggtggtggtttggcttcagtaaggatggaactcaaatttttgctacaagaatcacaacaggaaactacagtaaagcagctccagtctccactaccactgcctaccaccctacctctgctttcagcaagtattgcgtcaacaaaaacagtcatagctaatcctgtattgtacttaaataatcacatccatgatatactttatactattgttcagatgaaaacaccacctcatcccagtattgaagatgtgaaggtgcacacacttcattcactagcagcatcactttctgcatcaatttaccaagcattatgtgacagtcatagctacagtcaaacagaaggaaatcagtttacaggaatggcttatcaaggacttcttttaagtgatcgtagaagactaaggacagaaagcattgaagaacacgcaacaccaaattcatctcctgctcaatggcctggtgtgagctcacttattaatcttttgagttcagcccaagatgaagaccagccaaaactgaacattttgctatgtgaagctgttgttgctgtttacttaagtttattgatacatgctcttgccacaaattcctccagtgaattatttcggcttgcagcccacccattaaataatcgaatgtgggctgctgtttttggaggcggtgtaaaacttgttgtgaaacctcgaagacaatcagaaaatatttcagcacctcctgtcctttctgaagacatagataaacaccgtaggagatttaacatgagaatgctcgtccctggaaggcctgtaaaagatgctaccccaccaccggtgcctgcagaaagaccatcttacaaagaaaaatttattcctcccgaacttagtatgtgggattattttgttgcaaagccatttcttcctttgtctgatagtggtgttatatatgattctgatgaaagcattcatagtgatgaagaagatgatgcctttttttcagatacacaaatacaggagcaccaagatccaaattcctatagctgggctcttctacatttgacaatggttaaactagcacttcacaatgtcaagaatttctttcctattgctggactggaattctctgagctgcctgtaacatcaccattaggtattgctgtgattaaaaacttggagaactgggaacagatcttgcaagagaaaatggatcagtttgaaggtccaccccctaactatatcaacacatatccaactgacctttcagtgggagctggaccagctattcttcgaaataaagcaatgctagaacctgaaaataccccattcaagtcccgggattcttctgcatttccagtcaaacgactttggcatttccttgttaaacaagaggtccttcaagagacatttattagatatattttcactaagaaaagaaagcagagtgaggttgaagctgatctgggctatccaggtggaaaggcgaaagtcatccataaggaatctgatatgatcatggcattttctgttaataaggcaaattgtaatgaaattgttttggcttcaacacatgatgttcaagaacttgatgttacttctctactggcctgtcagtcatacatatggatcggagaagaatatgacagagaatccaaaagttcagatgatgttgattatcgtggttccactacaactctttatcaacccagtgcaacatcctattcagcaagtcaggtgcatccaccttcatctctgccatggctgggcactggacagactagcactggagctagtgtgcttatgaaaaggaatctacataatgttaagagaatgacttcacacccagtccatcaatactatcttacaggtgctcaggacggcagtgtacgaatgtttgaatggacgcggcctcagcaacttgtctgctttcgtcaagctggcaatgcaagagttactagattatattttaattcacaaggcaacaagtgtggtgttgcggatggagagggttttctgagtatctggcaagttaaccaaactgcatcaaatcctaaaccttatatgagttggcagtgccacagtaaagccacaagtgactttgcatttattacctcttcaagtctagttgccacatctggacactccaatgacaatagaaatgtttgcctctgggacacattaatatcacccggaaacagcctcattcatggtttcacgtgccacgatcatggtgccacggtactgcagtatgcacccaaacagcaactcctaatctcggggggtaggaaaggacacgtctgcatttttgacatcaggcaaaggcagctcattcacacgttccaggcccatgactcagctattaaggctctggccttggatccctatgaggaatattttaccacaggttcagcagaaggtaacataaaggtttggagattgacaggccatggcctaattcattcatttaaaagtgaacatgctaagcagtccatatttcgaaacattggggctggagtcatgcagattgacatcatccagggcaatcggctcttctcctgtggtgcagatggcacgctgaaaaccagggttttgcccaatgcttttaacatccctaacagaattcttgacattctataa

SEQ ID NO: 8 - protein, 3036 aa, Homo sapiens
MHLHQVLTGAVNPGDNCYSVGSVGDVPFTAYGSGCDIVILANDFECVQIIPGAKHGNIQVSCVECSNQQGRIAASYGNAVCIFEPLGINSHKRNCQLKCQWLKTGQFFLSSVTYNLAWDPQDNRLLTATDSIQLWAPPGDDILEEEEEIDNTVPPVLNDWKCVWQCKTSVSVHLMEWSPDGEYFATAGKDDCLLKVWYPMTGWKSSIIPQDHHEVKRRQSSTQFSFVYLAHPRAVTGFSWRKTSKYMPRGSVCNVLLTSCHDGVCRLWAETLLPEDCLLGEQICETTTSSIASSLSHAGRHKDRIQHALETIHHLKNLRKGQRRSSVLVTHAELMPDQTAMHEVQRHISHHANALCHFHIAASINPATDIPNVLVGTAFNVDDGNGGFVVHWLNNKEFHFTSSTEVFMHQLRKLSDKQVDHENDDADREDEEHSQEDRERGLHMKLDHDLSLDRESEAGTGSSEHEDGEREGSPRTYSRLSVPMPLPTVLLDRKIETLLTEWNKNPDMLFTIHPVDGTFLVWHVKYLDEYNPGIFRQVQVSFSSRIPVAFPSGDASSLSKNIMMYACINATKDSHHTLLHQEGMSVGSPHGSQPHSRSHSTHMNILAPTVMMISKHIDGSLNQWAVTFADKSAFTTVLTVSHKFRYCGHRFHLNDLACHSVLPLLLTSSHHNALLTPELDCQWDSDNKLSRLMDPVKHIKGSSKQPLRNAATRTFHDPNAIYSELILWRVDPIGPLSYTGGVSELARINSLHTSAFSNVAWLPTLIPSYCLGTYCNSASACFVASDGKNLRLYQAVVDARKLLDELSDPESSKLIGEVFNIVSQQSTARPGCIIELDAITNQCGSNTQLLHVFQEDFIIGYKPHKEDMEKKETEIFFQPSQGYRPPPFSEKFFLVVIEKDSNNNSILHMWHLHLKSVQACLAKASEGASSESLLSVPGQKNVDSSPETSPSVSPMPHSSSIANLQTASKLILSSRLVYSQPLDLPESVEVIRATPSAGHLSSSSIYPVCLAPYLVVTTCSDNKVRFWKCCMEANPECNKSDEKEIYHWKRWPLMNDEGEDNSSTVSIVGRPVAVSCSYTGRLAVAYKQPIHHNGFVSKEFSMHVCIFECESTGGSEWVLEQTIHLDDLVKVGSVLDSRVSVDSNLFVYSKSDALLSKDRYLIPNIKHLVHLDWVSKEDGSHILTVGVGANIFMYGRLSGIVTEQTNSKDGVAVITLPLGGSIKQGVKSRWVLLRSIDLVSSVDGTPSLPVSLSWVRDGILVVGMDCEMHVYAQWKHAVKFGDTEADSSNAEEAAMQDHSTFKSNMLARKSVVEGTAISDDVFCSPTVIQDGGLFEAAHVLSPTLPQYHPTQLLELMDLGKVRRAKAILSHLVKCIAGEVAIVRDPDAGEGTKRHLSRTISVSGSTAKETVTVGKDGTRDYTEIDSIPPLPLYALLAADQDTSYRISEESTKIPQSYEDQTVSQPEDQYSELFQIQDIPTDDIDLEPEKRENKSKVINLSQYGPAYFGQEHARVLSSHLMHSSLPGLTRLEQMFLVALADTVATTSTELDESRDKSCSGRDTLDECGLRYLLAMRLHTCLLTSLPPLYRVQLLHQGVSTCHFAWAFHSEAEEELINMIPAIQRGDPQWSELRAMGIGWWVRNINTLRRCIEKVAKASFQRNNDALDAALFYLSMKKKAVVWGLFRSQHDEKMTTFFSHNFNEDRWRKAALKNAFSLLGKQRFEQSAAFFLLAGSLKDAIEVCLEKMEDIQLAMVIARLYESEFETSSTYISILNQKILGCQKDGSGFSCKRLHPDPFLRSLAYWVMKDYTRALDTLLEQTPKEDDEHQVIIKSCNPVAFSFYNYLRTHPLLIRRNLASPEGTLATLGLKTEKNFVDKINLIERKLFFTTANAHFKVGCPVLALEVLSKIPKVTKTSALSAKKDQPDFISHRMDDVPSHSKALSDGNGSSGIEWSNVTSSQYDWSQPIVKVDEEPLNLDWGEDHDSALDEEEDDAVGLVMKSTDAREKDKQSDQKASDPNMLLTPQEEDDPEGDTEVDVIAEQLKFRACLKILMTELRTLATGYEVDGGKLRFQLYNWLEKEIAALHEICNHESVIKEYSSKTYSKVESDLLDQEEMVDKPDIGSYERHQIERRRLQAKREHAERRKSWLQKNQDLLRVFLSYCSLHGAQGGGLASVRMELKFLLQESQQETTVKQLQSPLPLPTTLPLLSASIASTKTVIANPVLYLNNHIHDILYTIVQMKTPPHPSIEDVKVHTLHSLAASLSASIYQALCDSHSYSQTEGNQFTGMAYQGLLLSDRRRLRTESIEEHATPNSSPAQWPGVSSLINLLSSAQDEDQPKLNILLCEAVVAVYLSLLIHALATNSSSELFRLAAHPLNNRMWAAVFGGGVKLVVKPRRQSENISAPPVLSEDIDKHRRRFNMRMLVPGRPVKDATPPPVPAERPSYKEKFIPPELSMWDYFVAKPFLPLSDSGVIYDSDESIHSDEEDDAFFSDTQIQEHQDPNSYSWALLHLTMVKLALHNVKNFFPIAGLEFSELPVTSPLGIAVIKNLENWEQILQEKMDQFEGPPPNYINTYPTDLSVGAGPAILRNKAMLEPENTPFKSRDSSAFPVKRLWHFLVKQEVLQETFIRYIFTKKRKQSEVEADLGYPGGKAKVIHKESDMIMAFSVNKANCNEIVLASTHDVQELDVTSLLACQSYIWIGEEYDRESKSSDDVDYRGSTTTLYQPSATSYSASQVHPPSSLPWLGTGQTSTGASVLMKRNLHNVKRMTSHPVHQYYLTGAQDGSVRMFEWTRPQQLVCFRQAGNARVTRLYFNSQGNKCGVADGEGFLSIWQVNQTASNPKPYMSWQCHSKATSDFAFITSSSLVATSGHSNDNRNVCLWDTLISPGNSLIHGFTCHDHGATVLQYAPKQQLLISGGRKGHVCIFDIRQRQLIHTFQAHDSAIKALALDPYEEYFTTGSAEGNIKVWRLTGHGLIHSFKSEHAKQSIFRNIGAGVMQIDIIQGNRLFSCGADGTLKTRVLPNAFNIPNRILDIL

That which is claimed is:

1. A method of identifying a human subject as having an increased likelihood of having DMXL-associated mental retardation, comprising detecting, in a nucleic acid sample from the subject, a mutation in a nucleotide sequence encoding DMXL1 and/or a mutation in a nucleotide sequence encoding DMXL2.

2. A method of identifying a human subject as having DMXL-associated mental retardation, comprising detecting, in a nucleic acid sample from the subject, a mutation in a nucleotide sequence encoding DMXL1 and/or a mutation in a nucleotide sequence encoding DMXL2.

3. The method of claim 1, wherein the mutation is a missense mutation.

4. The method of claim 2, wherein the mutation is a missense mutation.

5. The method of claim 1, wherein the mutation is detected by a method selected from the group consisting of sequencing, electrophoretic mobility, nucleic acid hybridization, fluorescence in situ hybridization, polymerase chain reaction, reverse transcription-polymerase chain reaction, denaturing high-performance liquid chromatography, CGH array and any combination thereof.

6. A method of identifying a human subject as having an increased likelihood of having DMXL-associated mental retardation, comprising detecting, in a sample from the subject, a mutation in a DMXL1 protein and/or a mutation in a DMXL2 protein.

7. A method of identifying a human subject as having DMXL-associated mental retardation, comprising detecting, in a sample from the subject, a mutation in a DMXL1 protein and/or a mutation in a DMXL2 protein.

8. The method of claim 6, wherein the mutation is a missense mutation.

9. The method of claim 7, wherein the mutation is a missense mutation.

10. The method of claim 6, wherein the mutation is detected by a method selected from the group consisting of sequencing, immunoassay, molecular weight analysis, electrophoresis and any combination thereof.

11. The method of claim 1, wherein the mutation disrupts the function of the DMXL1 protein and/or the DMXL2 protein.

12. The method of claim 6, wherein the mutation disrupts the function of the DMXL1 protein and/or the DMXL2 protein.

13. The method of claim 1, wherein the subject has a DMXL-associated mental retardation phenotype.

14. The method of claim 13, wherein the subject has tested negative for Prader Willi syndrome, Rett syndrome and/or Angelman syndrome.

15. The method of claim 6, wherein the subject has a DMXL-associated mental retardation phenotype.

16. The method of claim 15, wherein the subject has tested negative for Prader Willi syndrome, Rett syndrome and/or Angelman syndrome.

17. A method of amplifying a segment of a nucleotide sequence encoding DMXL1, comprising:
a) choosing a first oligonucleotide primer from a nucleic acid sequence comprising the nucleotide sequence of SEQ ID NO:1, the nucleotide sequence of SEQ ID NO:3 or the nucleotide sequence of SEQ ID NO:5;
b) choosing a second oligonucleotide primer from a nucleic acid sequence comprising the nucleotide sequence of SEQ ID NO:1, the nucleotide sequence of SEQ ID NO:3 or the nucleotide sequence of SEQ ID NO:5 that differs in nucleotide sequence from the first oligonucleotide primer;
c) adding said first oligonucleotide primer and said second oligonucleotide primer to a nucleic acid sample; and
d) amplifying a segment of the nucleotide sequence encoding DMXL1 defined by said first oligonucleotide primer and said second oligonucleotide primer, wherein said nucleic acid sample is from a subject having a DMXL-associated mental retardation phenotype.

18. A method of amplifying a segment of a nucleotide sequence encoding DMXL2, comprising:
a) choosing a first oligonucleotide primer from a nucleic acid sequence comprising the nucleotide sequence of SEQ ID NO:2, the nucleotide sequence of SEQ ID NO:4 or the nucleotide sequence of SEQ ID NO:7;
b) choosing a second oligonucleotide primer from a nucleic acid sequence comprising the nucleotide sequence of SEQ ID NO:1, the nucleotide sequence of SEQ ID NO:3 or the nucleotide sequence of SEQ ID NO:5 that differs in nucleotide sequence from the first oligonucleotide primer;
c) adding said first oligonucleotide primer and said second oligonucleotide primer to a nucleic acid sample; and
d) amplifying a segment of the nucleotide sequence encoding DMXL2 defined by said first oligonucleotide primer and said second oligonucleotide primer, wherein said nucleic acid sample is from a subject having a DMXL-associated mental retardation phenotype.
